United States Patent Application Publication US 2019/0136325 A1 - sequence listing, part 3

SEQ ID NO: 10407 - DNA, 1683 bp, Artificial Sequence
  Description of Artificial Sequence: Synthetic polynucleotide
atygagggagggtgtaaaaggyggggggyggagggggggtagattagattaggygaaatttaataagtttttagttttttagtttaaagtttttattatygtygttattaaygagttattttaattgagttagtatygtygtttattygtyggttygtyggaatygygtttattttttgtaatttygttyggatyggtatttygttttttyggttyggttttttttttttygtygggtgtaaagttaaagatttagtaaggygaygtgaatttttgtatgtagggtatataygtygttttyggtttygggagtgygggggttygyggygyggagggaggttgggygttygggttttygggttaaggtygtygygygtgtttatttatgtttyggyggtttyggtttygttggtttyggygttygtttagatttyggttttygtygttygttygagtttttaaaggtgttgttgyggtaattttatggygatgagtatttgttaaayggygagtygygagttggtygttttagttyggggggygtyggggttttygggygygyggaggyggyggygagyggygggygtttyggtyggtttygygtttttygttygattttgtygttttygtygygttatygatttatggagagagatattaagggggaaaatggygttttyggagttygaggagttttggagtaattatatttatatatataygttygtaygtatatatattygtatatattggtatataggygygyggygagttttgttaattttagtaggagttaaaaaaaattttatatatatatatatatatatatatatatatatattttygttttttygattaatgttttttttttttttgtttttttttttttttttttttttttttttgtttttttttaaaggatgggttggagygttaaaaaatgttggtgggtttgggttygtaggaggyggygygyggagggygagggygtttttgttgagttgtgtagttyggttygttgagttyggyggttttgttygttygttygttygttygyggtygttagtgttgtygtygtygtygtygtygtygtygttgttgttttatggtygygttygtttygygttttygtygygtttygtygtygttygttygygttttyggtgagygttggagtggggtygggttygtgtgtttgtttttygygtttttttygaatttyggatttttagtgaaaggaagggggagggygygggygyggaagggaggtggatyggagyggtagygyggtttagtygaaygggtatygatygttatttygygatttttttygtagggggygtyggygtttaagttgttygttyggagggtttagagtygttttttagattagagtygggggaggygtagttagtagygagttttgagygatttttttttttattygtttttttgttttagtgaatttttgttagttgaagggagyggggtttttgttyggggaaaaggaaaatagttygtggtttgggatttgggattttttgtygtttttagygtttttttygtttttyggygtttttgyggtttagtggtttttgygygtyggagttygtygygaagattgagyggtygyggggatygtygygggtttygygygtatttttgggtttaatattgttatta

SEQ ID NO: 10408 - DNA, 233 bp, Artificial Sequence
  Description of Artificial Sequence: Synthetic polynucleotide
aaataaaaagattaaaggagtagyggtyggggyggtagyggtttttaggtygggatattyggggtggtgygttygggtttgygggggttgygtyggygtyggggaggyggggggagygggagygggygaygyggggaaggggggagttagggggagggygtyggtyggaggaggggyggattygttygttttagtygagtagagtatagtygagtygagyggttygggygggg

SEQ ID NO: 10409 - DNA, 213 bp, Artificial Sequence
  Description of Artificial Sequence: Synthetic polynucleotide
tttttttttaaagtaaatagtatttttttattattttgtagttgggttttttttattggttttygttttttyggtggagayggygaygtggtttataygygagtttttygtygaggatgaattattagttagttygagttgttatattttattttagtatagttatygygagagtttyggggtygygtyggygtgttttaygtaygygtagtt

SEQ ID NO: 10410 - DNA, 236 bp, Artificial Sequence
  Description of Artificial Sequence: Synthetic polynucleotide
ygygttgagttttattttgyggyggtyggaygtttyggygtagggggyggygyggygggygyggtgttgggtatygataaygtgtgygagttggyggygyggttgttttttagtatygtggagtgggygygttaygygtttttttttttygagttgtyggtggtygattaggtggygttgttgygtttgagttggagygagtttttygtgttgaaygyggygtaggyggygttgtt

SEQ ID NO: 10411 - DNA, 233 bp, Artificial Sequence
  Description of Artificial Sequence: Synthetic polynucleotide
ttagttgtggatttttaatatttgtaggttataggattagaggttgggtttttaggagtagaggatatagagtagtgaagaygagattyggagttttagyggtagttaaagataaagaagyggataaatttygttatatttyggaagtygtttttttygtttaagttgygtgtttgattggatagtttttagtttagygtygttgattggataaygtttaaaattttattttt

SEQ ID NO: 10412 - DNA, 737 bp, Artificial Sequence
  Description of Artificial Sequence: Synthetic polynucleotide
ttygttygatttaggtttygagtttttttttygattttttttagtttaaaggttgtattygttttaggtttttttagttyggttttttagtttttttttyggttttttttagtttggggttygggtttttttttyggttgagtagtygggttygygattttttttatttttttyggttygggttttyggttttttttagaggtgaggtaggggttatttagaatttygyggttttttattttttttaagattattttygttttagttttttgttttttattttgtttttttaatttgggttttygattattgtttygattttattttgtygttagggattattagtygtttttttygygtttaggggaygygtagyggtagtttttgttgatggtaagggtttgygtattyggaaattttagggtttggggygtggtgyggtttttgyggttagygggtttygtttgagttttagggttttttygttgttggattaygttttttataggttttagggtygyggatgaatttygatttttgttttttttttyggtgttgtggttattgagttaagtttggygagtygaggtgattygggtygggttgygggaggagttygyggtgaggtggtttygygttgtygggygaggtyggtttaygtggagtygggagtttgaggtttttgtaygygggagttgyggaygatggtggttagtgttattgtttaygaygttatt

SEQ ID NO: 10413 - DNA, 308 bp, Artificial Sequence
  Description of Artificial Sequence: Synthetic polynucleotide
atagaggtgtagtttagggtttaagatttggttttygggttttaagtttaatttygggttygttagtttagtaggtgyggagttaagtttttttatagaygyggttttttttttaygygaggtttttaaatttygtaaattaayggaaatgaagttaygtttygggagyggtgtttttgggaaatgtagtttagygtttyggaygtygtgtttttgggaaatgtagtttagygtttggttagtyggttagaaygttaggaggttygggtygtttatttttygaggggttygtgggttyggtttgtgga

SEQ ID NO: 10414 - DNA, 1100 bp, Artificial Sequence
  Description of Artificial Sequence: Synthetic polynucleotide
tgatgygtttggtgattttttttgggtttttgtttaagyggagttataggttgtgggggyggttaggtttttggggaagagtaggtgtygyggtgtyggygygttagtagttygyggttaaggttatttgtttttagggtttyggtatttttgyggggaggyggtaggtagaggaygygygygtagtygygtaggagtttttaggygagtgggggaagtatygtaagagaygyggatttggagygyggttattgygttatygtagygatttgggttatttaagtyggygggattgagaggtygttgygygtgggtaggggtttagattgygttygyggtgtttgtttyggtttttatttyggaaygattgtagttttgyggggttygtygtttatatygygttgaggaygttgtttaagttaggygttygttttygttygyggttttagtygttygtagygygtygtttttagaygygygtggttgttggygagggttgagatygygttttygtyggttagtttttagtagtagygtattttttttgtttygygttttygtttyggattygygtygtygtagtttygyggtgatgagtttygagtyggtttygtygtygtygtygttttagtgttttggttgygatygygyggagtygatygtttagygtttagaggagggygaygaggtttttygygygggygattaygagatggtagtygagttttttygttttatgttagtygggttggygtagtyggatygyggtttgtgtttgaggttgggggaygygttggttygygtyggtygttttttygaagttttgggygygtttygyggygtygygyggttyggggygttgyggtyggaggagttggaagagttggygggyggtttggtgygygtygtgggtttgygygatyggtygttgttygyggagaattygggyggygagttygaggygttyggygagggagggtyggtttyggagtttygygygtttygygatttgttyggttgttygygttgtyggyggttgttgtataagtyggtgaygttgttttgygggtttatagtttgtaagygttgygtggagttag

SEQ ID NO: 10415 - DNA, 214 bp, Artificial Sequence
  Description of Artificial Sequence: Synthetic polynucleotide
gaagaaataatatattgtagattgtaaygagtayggggagttagygaaaggtagggygtttattagggygygttgagagatygggaattttygtaagggygttygygtygttygttattygtygtygygygtaygtygygttttygtttatttttaaataatatttatagttagggtttttttttttttttttttttttttttttgttttygtt

SEQ ID NO: 10416 - DNA, 582 bp, Artificial Sequence
  Description of Artificial Sequence: Synthetic polynucleotide
agtttgttttttttaggaggagttgttttygtygttttttygggttatggtygaygagygyggygyggaggagyggtygggggygygttggggagggggygtygggggygyggygygggygtagaggyggyggggatgtygggyggttygggttgyggygtagtttttttttttgtagttttttttttygttttygtygtygtygtygyggtygyggtttttttttggtttttatttttgttgttttygggtatagattttttgtygtygtygygygtyggtttttttgtygtygtttgttagttttattttttgttatttttttgtttttttttygttttttttttgtygttygtygygtttttttttatttygygttttttttttttttttttttttttttttttttygygggtttttygtttttttygtgygtttyggtygtttttygtttttagygygtygttttyggggatgtttygttttttttttaagagygtygggttayggtygtygtgttttttggagtttyggygagggygggtaygggttttyggtaggtgyggggygtaygygggagag

SEQ ID NO: 10417 - DNA, 203 bp, Artificial Sequence
  Description of Artificial Sequence: Synthetic polynucleotide
tttttaggaggygttttgatttygtatttyggttttttatttttygatygttagttttagggtygtygyggygaygygygattttttttttttgaggggygygggtttyggaygygtygggttttgttaggtatttagtggagggtyggaggtyggygattagttygagtttagtygtttygggagttggygygagtgtygtt

SEQ ID NO: 10418 - DNA, 823 bp, Artificial Sequence
  Description of Artificial Sequence: Synthetic polynucleotide
taattatttgttttagatygygttatttgtaatttgtttygggttggygttatattyggygtttyggygttttttataagtgttttygtttatgattagygtttgtaggggtagttyggagttygggtggggatagtagygtagtttttggtygtagygyggggtgtagaygtygtaygtttygttttttagtygggygtatatygagtagtagtygtagttyggttttyggaygagtttygygtatggtatgygggygttttyggttattgyggttatygyggygggyggygtaatyggygggggttygtaggyggttaggygttygggtgtgtagggygggtagyggaatagtattttygygygygtttygtygtygtygttattygygtttagtagtagtagtagtagyggtagtagyggyggyggyggtagyggtagygyggggtagtttattttyggtagtatgttggyggtyggtagygyggygtggygggygagygagygagygggygggygggtaggtggtayggttttgygagygygggagtygtttttttygttttttttttttttttygtygtygtagtygggttttaaagggtyggttttttttygttttttgttttttttttttttttttttggagattatttttttttttttygatattttttygygtyggtaagtgagtgygygtaygttygttygtttattttygygttggttgygggttttgggggttttttgtttttttygggtttygttttttygtatttttttggtttgattatgatttttgaaggagaatayggataattyg

SEQ ID NO: 10419 - DNA, 293 bp, Artificial Sequence
  Description of Artificial Sequence: Synthetic polynucleotide
ttttgtttttaagggagagggatagtattttttygggtttttagtttttttgggtgtggygggagagttttgggygaggttgygtttatatttgtatttyggtyggttttttyggttgatttygttttggttgatttygygtatattttttttttagygttgtaaggatygtttgaattygttggttatttyggtgatgaattagtggttyggtgtgaagttgygggtgatygagggttgggaygaggayggttattatttagaggagtttttgtattatgagggtygygygg

SEQ ID NO: 10420 - DNA, 262 bp, Artificial Sequence
  Description of Artificial Sequence: Synthetic polynucleotide
gyggggtatgttggygyggttygagggtayggtattggttyggtttttttttygygttyggtttyggyggtttttagtgttttyggtttattgttygggygyggyggttgygggattygygtggygtyggygayggttyggtttagttttgygttttgtaygygygtttttgttttygggttyggtagtygtttttttttaayggggggagggggttattgttttygtttttygttttttttggagttaattagygygttyg

SEQ ID NO: 10421 - DNA, 240 bp, Artificial Sequence
  Description of Artificial Sequence: Synthetic polynucleotide
gttttttttttattgttttttygttattagtygtttttgtygtygagttygtagtygttagygygtttygagtttttttaggttagaggttttygtaggygatggyggataagagggyggggattttagaagtygyggygygttygtygttyggttttgttygggagggggaygygygtayggttttygyggttygggttygagaagttggggggygygggtttttttatttygtagygg

SEQ ID NO: 10422 - DNA, 1240 bp, Artificial Sequence
  Description of Artificial Sequence: Synthetic polynucleotide
ggygtttttgygtatagtggttatttggggtygtattttatgtttgtttgagttttttygyggygggttgaygtygggatttgtttaatygttataaaaygtttaaataaaaatagggtyggttttttagtagtggagagttattyggagtatygtttygggtyggtttyggtttygaggtttygggggtttaggatttygtgygtgtggyggggaagaggaatttagagtttttgggttgttgtttttttygtygtttttattgtgaatattgtgyggtggggtgaaygyggggagyggyggggttagtggagtygaattttagggttttgygattgtattygttaggaggggttttygtttggtttgagaaaggttttttgaggttaagagttgggtttgaatataattttyggagtttygagttygttttttttaatatataaataygygtagatttttagaaataggaaygtaygatatatayggttagaagtygygaggatatatagagygtygtttattgggygggggtygtttgggaataaagggtttaggaggygttgtttyggygtttattttgagtttttttgggggtgataygggatgggggtggggtgtaaagggaattgagggaggagagtgygygaggaggggaaagyggtgatttggtttagaggtggggygygtattttaggygagygtgygtgggtygggatttgtagggtaygggggtgggtttaggttggtygttttatttygttttagygtttygttaggttttygtygtttyggggtygttygggtygttagttagttgaygyggggggygggggagttgttaggygygtttygttttgygtygttgggtygyggaggtygtgtagttattggttygygtatygggtygttygggttttygtattttagtgatattaggaggygataaaaggttgyggygtygtyggatttagtatagttgtatygtygagttgygagyggttgygagygagagagygtaagagtaagagagttagagagygagtaaygggtattygttttaygtttttttttagttttatygygygtttygtttgtttttttatttygttygattttattyggttyggtttttgygygggtatagtttagagttttggggyggtgtaggtagtttygggatttttyggygygtygtygygtttttagataaaggtttggtyggyggtttyggttygtt

SEQ ID NO: 10423 - DNA, 222 bp, Artificial Sequence
  Description of Artificial Sequence: Synthetic polynucleotide
aataaaaatttatattatatagygatggtggtgtttggtggyggtggyggggtggggggtttgattagatgagtygtttttygygttttyggygtygggygttatggttygagtygaaggygtttttggtttyggagygttygyggtttttgygtttggygyggtygtttaagtaggagaagaaggygtagtttaggaatattyggaagtagtaggtygttt

SEQ ID NO: 10424 - DNA, 714 bp, Artificial Sequence
  Description of Artificial Sequence: Synthetic polynucleotide
tgtgattttttttttttgttttaagtggttggygatatagttttyggygygtygggtattgaggttttggagtatagygtggggggtttggtatagataygatttaygatygggtygattttyggttagaaagaattatgtttyggtygttygggtygygggttygyggtgtatttttgtaggtttttattttgtttyggtagaggtttgtaagaattttgtgggtgtttttyggagygggtagaggaggagtttagygtygaggtttaggygygtttygttttygttttttttygtgtttttttttygttgttttttttttaaaggtygagatttggaygttgttyggtggtttyggygggggttttgtttttggtygttgtttttttgaattttaggtgagaagaataaaaygttttgaygttgttyggttttyggtttttggagaggaygggtygtttttgtygagagaattgtgyggaattaggaagygttggtgttttttygtttttaygggattaagygaaattyggttttaaaygaagtaaagtyggttgttttttggagtatttttgttatagtatttttattttgggttagggtattttgttgyggattttgagttttaggaaggaggtttataatagyggaaagttatttttttttaagaattgttgagtttttyggattgtatttttaaagattttttttgaa

SEQ ID NO: 10425 - DNA, 1216 bp, Artificial Sequence
  Description of Artificial Sequence: Synthetic polynucleotide
tttattttgaggttttttagatttygtagggttttttaygttattaagtttgtttygattttttttygttgttttttatattttttgtygyggygyggtyggttagggatttatttygaggtttagttggtgggggtgttggggtgygygyggattyggtatttayggyggyggyggyggtagtagtagtaggaggaggagaaagaygaggaggaggaggaggattagttgagyggygttttttttttagttygtagygygtattggttttttggggtattttygggagagtattaagatyggagattaggyggygatataggtaatygttgttgtayggggttgggtttagtyggtttttagaggttagggtagggggaggtaggattgggaaggagggtyggagaagtggggtgtagagggyggggtagygagyggttaggttyggaggaaggygttttaggygtttagggatgtygtygttygggttgaygtygtyggttttttttttygttaggygggygtttgtagtygygggygtaygggtttygtttygtttatyggttygttgtyggygttygyggtgygtttygttttgtgtttttygtagtyggygtgtatttggtgtaagtaaaggyggttagttgatgggtygygygyggattggttgtttygtygtttttttttttttygttygatttttttygyggtttttygttttygttttyggygyggtttygtgttgggtattatttgtggatygtttaataaaggygtagygyggyggggttygggtggtygggtygyggtygtygttttttgtttaggggayggtaggttgyggttgggtagggaggygaagygtattgtyggtttttagtaaaagatagattaaaagaaaatataygttygtgttaggaggttagttaggtataatggggttttatttttttgyggygtagaattygggttygggggttgagaattagatatagttyggtttggggttgtgggagttaagtttyggggtgaaattygattttgygttttaaaatatagggygygttttygggttgtgtgtgygygttygggggygtttttygtagatttggttygggtyggtgtttttgtygygggaaggaggattyggaygtttaatttagyggygaagtygttttttattggaggaggtttttygaaaaygtttttgaaattt

SEQ ID NO: 10426 - DNA, 207 bp, Artificial Sequence
  Description of Artificial Sequence: Synthetic polynucleotide
ggtttgtttagtttttatttyggtatygaagtygtagttttygggtttattttygtatttttaggggttttygggggttgtygataggtttttgattagygagygygttttyggggtaagtatttttggygggtagaaatttgggagyggagtatagyggtgtaagggaatygtgttaggygggaagggyggaatttgyggggaatt

SEQ ID NO: 10427 - DNA, 253 bp, Artificial Sequence
  Description of Artificial Sequence: Synthetic polynucleotide
ggttgygtagygtttttaatttaatttttggatttattttygttttagtttttttygtgtttagygttttttgtaaatgattttttyggtygggtgtttygttttttttttyggtttttttygygtggtttgtttttygttygtttgygttygttyggtttttttgtttttgygtttttatttgatygtaaaggyggttagggtagttttygygyggtttgatagttayggtttttagtttgtttttggaygt

SEQ ID NO: 10428 - DNA, 209 bp, Artificial Sequence
  Description of Artificial Sequence: Synthetic polynucleotide
ggttaggtttgagttttatttatttaygtygtattttttttttttygtgggggtttatatggtygtgtygggygyggtttygygggygyggygatygggygataaygyggyggggayggtygygggttyggttgtggygtatygygagtygaggyggggayggttaggyggygyggggtagtgggyggygtattttttataggtygttc

SEQ ID NO: 10429 - DNA, 225 bp, Artificial Sequence
  Description of Artificial Sequence: Synthetic polynucleotide
ttgygatyggtttttaatttgggtygagttgygtagyggggygggygygyggggyggggygggtygygggttttggggagttggtygggaatyggagttygyggtygtttggtygaatttgttygygyggygtyggggaggagttyggggyggyggygyggggygygygttyggygagggygttttttttagggtygtttgtagtttgygggayggggtygagyg

SEQ ID NO: 10430 - DNA, 1133 bp, Artificial Sequence
  Description of Artificial Sequence: Synthetic polynucleotide
ggaggagaagygaygtaagtgggtagttttttagygtyggygaggygygggaggaggagaagtagtggggaggygtagtygtttatttgyggggtagggygyggaggagggattygggttgygygttttygggtygaggaattaggaygygttyggagtttygtaygyggttaagttyggggygtttttttttttyggtygggygaatttaaggggygtagttttttgttttgatagagttggtyggyggaggygtgtagagyggygagtyggygagttaggttgagaaattygagtygggaataaagaggggtyggattgagtgtgtgtgtyggttygagtttygggtagaggtatttgggttygaggttttygttgtgatttttygagatttygtagtgttttttattgyggagttttygygtttgtyggtaaaaattttatttttggtaaatttttttttttttttttttttttttyggtttttattttttgttttttttttttttttagtagattaaatgagtttygagaagaaaaatygaagygaaagggaagaaaataagaagatttaaaayggatatttttagygtgggtggttttttttttttttttttttttttttattttttaggaagtggaygtttygttattttttgatttttgtatttttttttggggtaaayggggtttttttgtttagatttttttttttttttyggaaaataaattattaagtyggtattyggggtaattatagtggagagggttttygyggagaygygtygtyggatttttttttgtattttggggaggygtgttttttttagaatyggygtttttygygygtaaatttyggygaygyggggtygyggggtggtygtyggggtagtttygtttagygygygtygygtagaygttttyggagtygttagttatygtagttttygtygtttagtgtttttyggtttygggggygggygtttgygtyggttttygygaagygggaaagygyggyggtygtygggattygggygtygyggtagttgtttyggttgtyggtyggyggtttygygttygttygtttygttttygttygttgttttgttgtaygaatttttttaatttttttt

SEQ ID NO: 10431 - DNA, 478 bp, Artificial Sequence
  Description of Artificial Sequence: Synthetic polynucleotide
tgaattgagggggttyggyggtygttgaggaggggagygygygggaggaggggygaggagttyggaggygggygyggttggtagtttagagggttygggyggaggtttgagagtagggttggaggggyggaggatyggggagattygttygyggygttttyggtyggttttgagtaggygtygtggtagygttygygttttttgttygtttttygtygtygttaggaygtaggttygygttagggttggyggtagggttygtagttgtyggtttggygtttttatttygygtagtyggtttygtttagttttttygygtttgattggtyggattttgtttttggyggaggtaattgttygyggattttttatttygygattttggttttttygtaagtttttyggattygggygttttyggtttttttttatttatttttttgtygggtaggttygygatttttygtttttygggtyg

SEQ ID NO: 10432 - DNA, 201 bp, Artificial Sequence
  Description of Artificial Sequence: Synthetic polynucleotide
ttaatgtgttttaataygttttaatgtgttgtgataggaaaagagtyggttaayggtattayggaagtattagttggtatagaggttyggtgtaattatygttttgtatygtaaaaygggtttaggaagtttttaggagatattagyggtgttagaatygagaaagtgaygatatagataatttatggatttygygtaygg

SEQ ID NO: 10433 - DNA, 208 bp, Artificial Sequence
  Description of Artificial Sequence: Synthetic polynucleotide
gttttygtygtygttygggtygygttygtttygtttttaggygtyggtttyggagttyggttygygagtagyggyggttgtyggagggaygatgagttgygyggggygggygggttttgttyggttygtygygttygttttgttgatttgtagtttgtggtyggtaygggtagataaygygagttaggagtattatayggygtttatt

SEQ ID NO: 10434 - DNA, 210 bp, Artificial Sequence
  Description of Artificial Sequence: Synthetic polynucleotide
ttagtttttygggaagtagtaggygtayggtygtttggatttttttggaggtgatggtygagygtttgttgtaatgygttaggygggaagtttygtyggygatgygttygaagatgtygttgataaaggaatttatgatttttatggttttagaggagatgtyggtgtyggggtggatttgttttagtattttgtataygtatayggagt

SEQ ID NO: 10435 - DNA, 229 bp, Artificial Sequence
  Description of Artificial Sequence: Synthetic polynucleotide
ttttaagatagggtttttttttygttygggttggagtgyggtggtaygattttyggtygttgtaaygttygtttttgggtttaagtgatttttttgtttyggttttttgagtagttgagattataagygttagttattatagttyggttaatttttgtattttttagtagagatagggttttattatattggttattttggttttaaatttttgagtttaggtgagtta

SEQ ID NO: 10436 - DNA, 209 bp, Artificial Sequence
  Description of Artificial Sequence: Synthetic polynucleotide
tttttttttttttttaatatttttttttagaaaaagaggaaygtaaygaagggagtttagttattatgttggagttgtggatyggttttgtgaggtttaygygggagygyggaggtttttgggttttagggygtyggtagatggtttgtagygtatygttyggttttygygttggttaygttygttagygttatttttttttttygttt

SEQ ID NO: 10437 - DNA, 255 bp, Artificial Sequence
  Description of Artificial Sequence: Synthetic polynucleotide
gttatttygtagygagttaaagttattttttattttgggttygttaygygatttttgtyggttttygttttaygyggttttagtayggygttaaggtttygtttataaatyggtttygttttttygtgttygggttygtygtttattagaygtygtttyggygtagygagttgagggtaygtttatttttttttygggtttttagtttttaaggttttagtataatgttttaggaggaagattttaggttttttt

SEQ ID NO: 10438 - DNA, 297 bp, Artificial Sequence
  Description of Artificial Sequence: Synthetic polynucleotide
tttattattgttaaygtygtygtygygttttttttattttatttttttttttttaggagaatttttagtttyggtttttttygtttyggygtttygttaygtgatttygggtygttttttataygtgatygtttttttttttttttttattttygtattygttttttttttagttttttgtttygttttgttggtygttaggtatttyggggagaggtygtttggaggyggggttttaggttttatttttyggagggtggagaggggygggtaaattaygtygagtgggyggggttt

SEQ ID NO: 10439 - DNA, 232 bp, Artificial Sequence
  Description of Artificial Sequence: Synthetic polynucleotide
tagtygttttaagtttttttttttttttttttttttttttttgtttyggaaagttagygagttttyggtagyggtygtattttygtttyggtggtttgaygayggyggyggtygtttttgygygttttttygttttttttyggtttagtttagaygtygtagtggyggtaattgyggtagyggtggyggttttgatttygygtatttygttttttttttttagttagtttat

SEQ ID NO: 10440 - DNA, 247 bp, Artificial Sequence
  Description of Artificial Sequence: Synthetic polynucleotide
tttttygyggttttttttttttygygtttttttttttatatygggttttyggggtagtagyggggaggggagatyggygggggagggaggatagggaggygaaggaattggggtggggggtgygtgtgtggtggagggggtgggaygatataggtgttttgaggggaggagtygggaggaaggygaggaggtygggttaagtgggggtgyggaggtyggggagataggaaygyggttgygggygygg

SEQ ID NO: 10441 - DNA, 292 bp, Artificial Sequence
  Description of Artificial Sequence: Synthetic polynucleotide
gggygttgaggttgaagttggggtygggggtgggattgggggygttggggttgggtygggggtgggattgaggttgygggygtttaattgggattgagtygagggtagyggtggggttgggtygggggagtaggggtygygtygggtagygtygygtgttggagyggaggygggtgyggtyggggtaggtygygggaggaggaagygtttggggagtaggagttgggtygggygggttygygtttygtattygygggggtgaatyggagtygtygtagggggttyggggggt

SEQ ID NO: 10442 - DNA, 201 bp, Artificial Sequence
  Description of Artificial Sequence: Synthetic polynucleotide
tgttgtggggtttagggttgtatggggtagtaaggygygggggttygggtygtagagttttyggggaggattyggaggggaggtagtggttyggyggttygggttatagttyggtgtggtgggggggagggagayggggygggagagggggtaaggttgtttttgaagggaattagttggttygttygttggtygagttgt

SEQ ID NO: 10443 - DNA, 201 bp, Artificial Sequence
  Description of Artificial Sequence: Synthetic polynucleotide
atttttgttttttatatttattttttattttygttttagaaataygttttttatatygggttygtyggatttttatattttttattygygttagaaaygygygtattttygtggtttttttttgtygygygtaaataygttyggttygygtaygttttttyggtttggtttygtatattygygttagaaataygygtggtc

SEQ ID NO: 10444 - DNA, 201 bp, Artificial Sequence
  Description of Artificial Sequence: Synthetic polynucleotide
ygaygttygagttagyggagttyggagtygttgggtttttygtttttttygttygttygtttttttygttttttyggtttttttygtttygtygttttgygtygttttattataaaaggtgaggttyggggggagggggygygggattttygtttygyggaagyggtttttatttgttttttaatttgttyggtygygttt

SEQ ID NO: 10445 - DNA, 201 bp, Artificial Sequence
  Description of Artificial Sequence: Synthetic polynucleotide
gttttattaagyggttttagttataayggygtgtatgttaattaygtttgtaggttatygttygttttyggttgtyggattatttagygygttttttttygagtttyggayggggagaggaggagttaggggaggaggygggaggaagggaaggatggggaggataatgggggaagaagagggaggatggaggaagggggt

SEQ ID NO: 10446 - DNA, 201 bp, Artificial Sequence
  Description of Artificial Sequence: Synthetic polynucleotide
tattatttygttgtyggyggygtttttttgggaagtagtagtaattggtggagttggagtygtagtagtttgagtygtygtagtagtttttgtyggagtygtagtaggaggaggaggaggygggygtyggggtgggygtyggggygggatayggagyggggttttgggaygattttttggaaaagtttttggyggaaaygg

SEQ ID NO: 10447 - DNA, 201 bp, Artificial Sequence
  Description of Artificial Sequence: Synthetic polynucleotide
gggyggggtyggaggaaaaggggyggggyggyggggaaaatataaattaaaatttaaaaattagttaaaggaaggatggaagtttygyggttttttyggygtttagyggtgtttttgttttggtgttyggattttagttygyggtttgtttgtttgttagtttygtggatatygtattgtygggtagygtttyggtygtat

SEQ ID NO: 10448 - DNA, 201 bp, Artificial Sequence
  Description of Artificial Sequence: Synthetic polynucleotide
tagtatgatgtygtttttttggtagtggtagggggtygggtaggyggtgggtttygggtygggttggggggygtygtyggtttttygggaagygtatagygyggygtaaagttatagygttyggagtttyggygggttgggtatttyggyggtygggttattggggtatttggyggtygggygyggaygtayggygygatg

SEQ ID NO: 10449 - DNA, 241 bp, Artificial Sequence
  Description of Artificial Sequence: Synthetic polynucleotide
ygaagaaaggggygygggggygygggggygygggggygygtggggygttgggygtyggaggtttggtaggatgygyggtggggtygtygtygtygtygtygttgygygttygttttttggtygggygygygtttygtttygtagtatttatagggygtygyggtttygtttttttataggtttygtttyggttagtttaygtttygttttyggtttygttttttgtygttagggygygtag

SEQ ID NO: 10450 - DNA, 201 bp, Artificial Sequence
  Description of Artificial Sequence: Synthetic polynucleotide
gtygttgtygttttgtygttyggtgtgygagygygttaaggtyggttgygygtygtttatgygttagtayggtttygtttggttygatygtatgygttgygatyggttgttygagtaaggtaattttgataygttgtgtatggattataatygtatygatttaattatygtygygtttagttygtygygtygtttgtygtc

SEQ ID NO: 10451 - DNA, 201 bp, Artificial Sequence
  Description of Artificial Sequence: Synthetic polynucleotide
agaggaagtgagaggtgtttaattyggttatgtagaaygtagttgggttgttygaaaygaaataaagyggttatttygaaggaggtgttgtttttgggtyggtttaggttgagttagagtagaygttatttttaygttaaaaatattaggttattgttttagggagttgggttatttattgaggttatttttattttattt

SEQ ID NO: 10452 - DNA, 201 bp, Artificial Sequence
  Description of Artificial Sequence: Synthetic polynucleotide
gtatttatttttttgayggtttygtttygtagggagggtttgtgtyggttgttggagtttattygtagatttatttttattattttygagggttagaggygygatttygygtattyggygtttygtttgttgygttagtatygttatttggtgattttgttgttttggaggttyggtttygtggtgyggagtaggygyggg

SEQ ID NO: 10453 - DNA, 201 bp, Artificial Sequence
  Description of Artificial Sequence: Synthetic polynucleotide
ggtttttggagttattggtttagggygggttygygggatggggygggyggttyggggygtagtyggttaggtygttgttatggtaaygyggtggaaaaaygggtttttgggtatttygttgtyggtyggttggtaattttttagyggagggatygggtygagttygyggattttttygagtgttttttggggtttagtygt

SEQ ID NO: 10454 - DNA, 201 bp, Artificial Sequence
  Description of Artificial Sequence: Synthetic polynucleotide
ttaaaagtagtttttttgaattttatttgggttttgtagggttttttygaggttygagaattgggagaagggaaagagtttatyggtttgtttgaaggtyggygggyggtgtaggtagttttttttagatttttttagtttyggttttttaygtatattagaagagtygttttttttttttagtgattgaaattatttgga

SEQ ID NO: 10455 - DNA, 201 bp, Artificial Sequence
  Description of Artificial Sequence: Synthetic polynucleotide
ggttttgttttagggttttgtattttygagagttgttgtatgtyggggattggtttttaagtttgtttgagtttttttagtttttygggtatygttatgyggtgggagggtgagttttttttttttgttgaaatttyggyggtttggtaatyggtyggggggttttggatttttyggggagatattattgatgttttgtgg

SEQ ID NO: 10456 - DNA, 201 bp, Artificial Sequence
  Description of Artificial Sequence: Synthetic polynucleotide
gtgtttttygttgatttttagaggagatattggttagggttttttttttygagataaattttattttggaaaggttgttagatygggygyggtgatttaygtttgtaattttagtattttgggaggatgaggtgggyggattgtttgagtttaggagttygaaattattttgggtaatatgttgaaatttygtttttatta

SEQ ID NO: 10457 - DNA, 201 bp, Artificial Sequence
  Description of Artificial Sequence: Synthetic polynucleotide
gtatatttyggtygggtgygggtyggyggggtatagyggtttttayggttygttttygttagttatttttyggttttttttttygttgttygygtgtttygggtyggtttagtatttttygagttaygtgttygygtttttyggyggggaggagygtagtygygggggygygtttyggtgatttygttttttagttttttt

SEQ ID NO: 10458 - DNA, 201 bp, Artificial Sequence
  Description of Artificial Sequence: Synthetic polynucleotide
ttttygygtatygtygtygygtatttatttttaygggtggagyggggyggggtagtayggtttygygygtagtttygattygttaggygtatygatyggyggygtagygttggygygayggttygattyggtygggtttttgtttygggygygggttyggtttgggagygggygagttygtttgtaggggaggyggggatt

SEQ ID NO: 10459 - DNA, 201 bp, Artificial Sequence
  Description of Artificial Sequence: Synthetic polynucleotide
ggggyggagyggggaggggyggggyggagyggggaggggyggggyggagaaggatygtagggttgagyggggygttagygttagtgttyggtattgtttygggttgggttttttgygttagaggaaggggagttyggggayggggtayggggttygygaggtaygggtgttttttyggggtttyggaagttttttttttyg

SEQ ID NO: 10460 - DNA, 239 bp, Artificial Sequence
  Description of Artificial Sequence: Synthetic polynucleotide
gagaggaagggggaaggagatagaggaatygagattggggtgagggagyggtygygygtggttttyggagaggygtttattatttgygtggygttttttygygtyggagtgyggttttgtttttagygttagtgygtygygyggttygtyggtttygtaggattggttatygttttttatttatgtaatttgygtgtgygtgtgygtgtgtgtgtgtgtttttttttygttygtttttt

SEQ ID NO: 10461 - DNA, 201 bp, Artificial Sequence
  Description of Artificial Sequence: Synthetic polynucleotide
ttttttygtgggtggttttygtgagttttttggttagtttttttattttagttttataatggtttatygtttgtaatattttttttgyggttatagtttyggtggatggaggtaggagggggttayggggtgggggagatggatgygaagttggyggggaaagggagaaggaaatgggaagggatgggtggaaayggaaaa

SEQ ID NO: 10462 - DNA, 201 bp, Artificial Sequence
  Description of Artificial Sequence: Synthetic polynucleotide
ttatttgaaattgataggtttgttttttatgataatagttgttattaattagttttttttatatttttttatttatyggttttagtattttgtatatttygyggagaattygtttttggttttttatagagtatagtattagggtgtagattattatatttatagagttattagttatttggtgtatgtttttttyggtag

SEQ ID NO: 10463 - DNA, 201 bp, Artificial Sequence
  Description of Artificial Sequence: Synthetic polynucleotide
aaaatagtagttttatggaaaataatagaaaaaaattttattttagtttggtaattaayggttggtygggggaygtgttygygttgtttttttttyggtygttagggggygtaggaagaagttttggaggtttgtttygggatygygtattygtttttttttttygttagttttttttttattttygttgagtttygtttc

SEQ ID NO: 10464 - DNA, 201 bp, Artificial Sequence
  Description of Artificial Sequence: Synthetic polynucleotide
gtttgaygaagttttttttgggggtygatgttttttttygggtgggaaggggygttgtyggtgagggttattttggygtyggtttgygtygttygaagtygggggggaggggaggttttygtttagtaggggttaygttygtttyggaygggggtygygygggygtttaggygaygtattttygtyggggttygtgatygt

SEQ ID NO: 10465 - DNA, 201 bp, Artificial Sequence
  Description of Artificial Sequence: Synthetic polynucleotide
ttttgagaagtaatagatttygattaatgtgtatygttttygyggygtttygtygygttyggaatygttgtttatttggygttyggtaaggaaggttgtyggagggtttataggtgtttttttygttttyggagaagttyggtgtgggyggygttattttagaaaygttatyggygygtttgtttygagyggygggggyga

SEQ ID NO: 10466 - DNA, 201 bp, Artificial Sequence
  Description of Artificial Sequence: Synthetic polynucleotide
tttgttatttgtatttaagatggatttttygttgtygtygttgttttttyggtttttttgttattattttttaygttttgtagttttgttttttgtttaygggttgttaagtygyggtttggtyggtggtggtagtggyggagttagataaagttttygtttttttygttttagagttttttaggygttttaagtggyggg

SEQ ID NO: 10467 - DNA, 201 bp, Artificial Sequence
  Description of Artificial Sequence: Synthetic polynucleotide
ttttagggyggtygtttttattttyggtttttatttagyggggatttattagggygagggttgaagatttygygggaygtygygygtyggggatagygaygtatttatttttttagttatttgggaggttgtaggttygggtyggagttygaggtttaggggygygyggagtagttttggttaaggygtagggygyggggt

SEQ ID NO: 10468 - DNA, 201 bp, Artificial Sequence
  Description of Artificial Sequence: Synthetic polynucleotide
ttttggggtygggyggggyggggyggggtaggggggtygggygyggtttaygygttttttygagtgygyggtgygggaygggygyggttgaygygttttygtyggtgtttgtgttttttygtaggttaggagggtattttgygttgttattyggatttggygggtagygagttgtagyggggtaygtttayggtygagtyg

SEQ ID NO: 10469 - DNA, 201 bp, Artificial Sequence
  Description of Artificial Sequence: Synthetic polynucleotide
ygggtttggataggttagtttgagagtatgygaagtyggttttygggtagataataagagatatygtygggaagtgttaggaatttygygygttgttygyggggtttttttgtagtyggggttgggttagaaggatggtaaagttgygyggygtygttygggttggagtygtagtygaggagtygaagtttttttaggtyg

SEQ ID NO: 10470 - DNA, 201 bp, Artificial Sequence
  Description of Artificial Sequence: Synthetic polynucleotide
gattyggagttaygyggggygggggtyggtatygagggtygggaggygygaagggtaygyggyggygggaagyggggygattygaaggtttaygggggtygggaggttgyggggygttygggattttttttygggtggttatygtgyggtyggggygyggaagttagaggtgtttagaggygtygatttygtygaggttgc

SEQ ID NO: 10471 - DNA, 201 bp, Artificial Sequence
  Description of Artificial Sequence: Synthetic polynucleotide
tagtygaggtagaaattygtttygaggygygggygtygggttygggttttaaggatgygygtygggttttttttygyggggatagtygagtttygtyggygttttaggtgttttygtagtgygttygggygyggaygtttttttgttttyggaggggaagygggagggtttttggggtaaygtttygatttygggtttttt

SEQ ID NO: 10472 - DNA, 201 bp, Artificial Sequence
  Description of Artificial Sequence: Synthetic polynucleotide
tataggtgttttygtygtaggtttygtatatttatttatggtatttatataggggttygaagaatatgttyggtttagttaygtggtagatgtagaygtygtagtygtagyggtttyggtygtggtatagygyggttttygggggttgtttaggtgygyggtagygtygtttygattyggttygggatagtttgtaggygg

SEQ ID NO: 10473 - DNA, 201 bp, Artificial Sequence
  Description of Artificial Sequence: Synthetic polynucleotide
agatygttgtttggttattttaygtttttgagttttttatatagttagtttygtgattttygagtttygtgattttygagtttygtgatttttaagtttyggaagtygttgtaggtagyggtttagttaggtttygttttttttatyggagttttaygygttaattttagttaggtttygttttyggtygttttaggygtg

SEQ ID NO: 10474 - DNA, 201 bp, Artificial Sequence
  Description of Artificial Sequence: Synthetic polynucleotide
gtagtagtttatygaggayggggattygtaagtggyggaggttyggggttgggggtygtygggagggygggaygygygyggtttgggggtgggaggygtygggtttggagttygagtygggggattagygatgtagtygggygggygtygyggtatttyggggtttttgtatygtttygaaygttgtagggttgtagggtc

SEQ ID NO: 10475 - DNA, 201 bp, Artificial Sequence
  Description of Artificial Sequence: Synthetic polynucleotide
attttgtaggtygtatttttaattygtattttatttaggttttygtttggygtygatttgttttagtttaattttyggtttygtagattaggtatttttygggaygyggggtagattttgygttygggttttttttygtagtygggttgttyggtttttgygygygtataataggyggtayggygtagttttygggagygc

SEQ ID NO: 10476 - DNA, 201 bp, Artificial Sequence
  Description of Artificial Sequence: Synthetic polynucleotide
aggatggygatggtattggygyggattttttttatggtgggtagaygggygttttaggtgggggattgggtyggygtgttttyggggtyggggygggggygttygtagttttagttgtttgttttygttygygtttagttgtttagttttgtagagtagaaaaaggagagaggtgggggggygggggggtgatagggagag

SEQ ID NO: 10477 - DNA, 201 bp, Artificial Sequence
  Description of Artificial Sequence: Synthetic polynucleotide
ttagttttttttgagggagtttagyggtgygggttygtttttttttagtttagtttttttgatatygttttttttttggggaygttgtttgygggttygygygttttygttttygatttttttgtaggttttttygggggtyggggtaggatygtatttatygaggattygggygttggagttagtagtagyggtaygagt

SEQ ID NO: 10478 - DNA, 201 bp, Artificial Sequence
  Description of Artificial Sequence: Synthetic polynucleotide
taagtygaagtttttgaaggaggttyggtgttatttyggtgtgatygygtttyggygaygttgggtagggtgtagggagttagttyggtygyggtttagygggaggggagggggtyggtttygaattygggygttygggtygygggtgatttattgggaaygttaggttygygygtttagatyggygggygaygtttagyg

SEQ ID NO: 10479 - DNA, 201 bp, Artificial Sequence
  Description of Artificial Sequence: Synthetic polynucleotide
gggggttyggtttagggygggaaatgggtggggaggggyggggtttgggttggagattggayggaggagtygggyggagatgtaattggaggaagagggygggayggggyggagaaggtttttygtatyggyggagggagagggattaggagggggttgyggygggggaggagagggggttttyggtttagagattgaggc

SEQ ID NO: 10480 - DNA, 201 bp, Artificial Sequence
  Description of Artificial Sequence: Synthetic polynucleotide
gygatttttgttttttttttgggtygagyggtaggygygttygtatygttttygttttttygtygtagtygttgtygatyggttggttgggttttgyggygtgaggatttyggyggygtygtagtttygygagttatggtttagttyggyggggaggttyggttygggtttaagayggyggtgtagattygygtygttatt

SEQ ID NO: 10481 - DNA, 201 bp, Artificial Sequence
  Description of Artificial Sequence: Synthetic polynucleotide
tttatgaatatttyggggygygggagttygagygttgtyggagggygtttygggggaggyggtygttgatgtaagttyggygggtygttgggtttygttyggttgyggygggagtttygggaygggtyggaygggtyggggtagaggaggygaggygagttygygggtggttagttataaagttygggyggygagatagac

SEQ ID NO: 10482 - DNA, 241 bp, Artificial Sequence
  Description of Artificial Sequence: Synthetic polynucleotide
ttttatttttatatatttatattyggtygtttttygtttttttattygtttgtygygygygygygygatttygtttatatatagygygygygaygtyggyggagatygtttygtttttttagatygaaygtygttygttygtttgttgaggagyggygygygtttyggtttygtttttttggygtygyggygyggygggyggggggyggyggtyggaggagttgggggtygggttagygyg

SEQ ID NO: 10483 - DNA, 201 bp, Artificial Sequence
  Description of Artificial Sequence: Synthetic polynucleotide
ttttygtygttttttaggtttttagtgaggttttttagttggtygtttattatggtttttattatgaaygttatggttttygtyggtyggggtatygggygtttgttattaygygttaggtatygggtaygttygygtttattttagtattaggtttygyggatagttttygtygygggttygygttttaygtttggtatc

SEQ ID NO: 10484 - DNA, 201 bp, Artificial Sequence
  Description of Artificial Sequence: Synthetic polynucleotide
gattyggtatgaggagttyggtatttttgttttttagttttttggaagtttttttttggattggtyggygtygttttttygatatttgggggttgaggtyggtatttygggtttgygtggaggggygagygttaaggttgygagagtygggtttygatttgtaattattttttttaatttttatggagtttygtttygygt

SEQ ID NO: 10485 - DNA, 201 bp, Artificial Sequence
  Description of Artificial Sequence: Synthetic polynucleotide
gygttyggtagagagtttttagtygtttyggatttygygtagtttygtagagaygygygtgtygttygtaygggtyggtattygggtygttttygtyggygtgttaggatttygtatagaagygttyggaygyggaygtaygtagtygyggttaygattttygtygttygttyggttygtgttyggttttggttagtaggg

SEQ ID NO: 10486 - DNA, 201 bp, Artificial Sequence
  Description of Artificial Sequence: Synthetic polynucleotide
ttttttyggttttttttttatttttygttttyggggtttttttttgttgagygggggttgtygggatttgggattgyggggttgtttygatttygtagtygttygyggtggaagttagttygggtttggttttgagygygyggttggggyggtygttgtttatggtgttggygygggtggygygtyggtyggyggggtttg

SEQ ID NO: 10487 - DNA, 201 bp, Artificial Sequence
  Description of Artificial Sequence: Synthetic polynucleotide
tygttygygtattggggttttygaggtgtgatgttatttgttygtagaatyggtttttttygygtygtttttttygygtttttattttagtttttttttygtygttttyggggttaatatggtagyggygtygtygttttattttygtaatygtaygattyggttggtagggtygtyggttyggattttygagatttatat

SEQ ID NO: 10488 - DNA, 201 bp, Artificial Sequence
  Description of Artificial Sequence: Synthetic polynucleotide
tygygggygyggtttttggaayggattttttttygagtygygttygtygggtygtttttttttygttygtagatttyggttyggtttygtygtygygygygttttttttygttttggttttttttttttygttttygggtttyggygttttygttyggttygagygygyggtttgtttygttyggtttattatggygyggt

SEQ ID NO: 10489 - DNA, 201 bp, Artificial Sequence
  Description of Artificial Sequence: Synthetic polynucleotide
ggttaggttttttaggagtagttggggaatattyggygattttggyggttgttttttggtggygtagggagttygygtgtttgygagtgygtgtgtgtgygaagtttttygggtaagtgtgttagygygygtttgggtgtgtgtaagggtgtgagygtgtataygtgggtaygggygtgtgygygygggggtgttyggttg

SEQ ID NO: 10490 - DNA, 201 bp, Artificial Sequence
  Description of Artificial Sequence: Synthetic polynucleotide
tttygtttttattygttttttttatygygtygttttttygttttgttttgygggtttaggyggaattyggaayggtygtttttttttttygtttttygtygtygttttttttttttttttttyggttttttttttagtttygggtyggagyggggtgtyggyggyggtyggttygggyggyggygtttggttatgtygtgt

SEQ ID NO: 10491 - DNA, 201 bp, Artificial Sequence
  Description of Artificial Sequence: Synthetic polynucleotide
ttaagttygttgggygttygtttttgygtatygygttygtttttttygtttgtgygtttgggtttyggygtaygtattgtatttgtygttygtttttgtygtgtgtgtgtattgtyggggttygttygtttaygttygygygtgygtttttatttttatttygtattygygtgtaygatttattygtygtygttgtgygyg

SEQ ID NO: 10492 - DNA, 201 bp, Artificial Sequence
  Description of Artificial Sequence: Synthetic polynucleotide
tgtygaatgaagttgagygttttagtggaattagggattttaggggtgagygatygygaggggagagygaygaaaagggyggtyggagttggaggggygyggagttaaataaaaaagggyggtyggagttgtaggggygtygagttaaataygttatttttagatggggggttttaggygagttgtttagtttttttgagg

SEQ ID NO: 10493 - DNA, 219 bp, Artificial Sequence
  Description of Artificial Sequence: Synthetic polynucleotide
cgtttgtttcgtcgttcgtatcggtttagttttcggcgttcgttcgtttttttcgttcggagcgttgtgagttaggagtagtcgtaggtttttcggacgcgttcgtcgcgcgtattacgtggttcggaggcggtcgttagtttgcgttcgcgatcgggggcggacgttgtattatcggttcggagttgggtaggggaggtttttcgttttttttttagg

SEQ ID NO: 10494 - DNA, 315 bp, Artificial Sequence
  Description of Artificial Sequence: Synthetic polynucleotide
gacgttttttagagacggcgttggtttttttcggcggggttggcggcggttgggggatgttagtcgggcgggtcgcgggtcgtttttttttataggtttcgagagcggggcggggttgggggcgggcggggagttgtttcgggtggtttcgtttttagtacggaggatttttttcgcgaggcgtcgtcgttttggagtttcgtttacggcgttcgacggtcggggaaattgcgggagttgggcgtttagtgggggaaaacgagtcgcggacgcgaaggggcgggatgaggttttcggggcggggttcggggttcg

SEQ ID NO: 10495 - DNA, 201 bp, Artificial Sequence
  Description of Artificial Sequence: Synthetic polynucleotide
cgcgtcgttttagcgttttgtagcggaggcgtcgtttttatttcgatcgtaggttcgttcgggtcgttcgttcgtcgggtatcgagtcgttttgtcgcgcgttgcgtttcggggcggggtgggaggagagggagtagtcgttattttgtttaggtcgtcgcgggttagttttgtagttagttttagttttgggtcgggtgt

SEQ ID NO: 10496 - DNA, 201 bp, Artificial Sequence
  Description of Artificial Sequence: Synthetic polynucleotide
gttcggagcggtcgtgaggggcggacggggggtttcggggcgggtttgtaggttttggggatttgaggttgtcgggaggggttgttagggggcgttggtcgggcgtcgggttttgcggagttggggcgtcgatttttgattcgcgagaggggcgttttcgtcgtgttggtcgtagttgttatttttagcgtttttattatt

SEQ ID NO: 10497 - DNA, 201 bp, Artificial Sequence
  Description of Artificial Sequence: Synthetic polynucleotide
cggcggtgattgcggtttcgcgcgcggttcggtttaggtaggattcgaagcgcggtttcgggcggcggcggcggcggcggcggcgtggtttcgttcgggcgggttttgcgggataagacggggagtcggttacggggtggggcgattggcgtttcgggagtaggaggagaatcgcgggtaggcgggcggggagggtgcgcg

SEQ ID NO: 10498 - DNA, 201 bp, Artificial Sequence
  Description of Artificial Sequence: Synthetic polynucleotide
aagtttttcgtttagttttgtcggttcggtttgggcgttgtggatcggtaatagtagttttattaggatgtaggtcggattaagtttttggggaaaattcgttgtaataattgttttttatatataatttttaattttttttttattttcgtttttaattcggagatttgtaaagtttaagaaagggaaaagtaattttat

SEQ ID NO: 10499 - DNA, 201 bp, Artificial Sequence
  Description of Artificial Sequence: Synthetic polynucleotide
tagtatcgtttcggtttcgcgttaggcggcgggggaggggaggagggatttttttaggggtgggtttggagggggtgggggcggttttttttttcgtttcgtcgcgggtttattgttcgggaggggcggggagatagtggggggtagtttcgggcgggagtggaggcggagatgtcgtcgtcgtagtcgtcgcggtggttg

SEQ ID NO: 10500 - DNA, 201 bp, Artificial Sequence
  Description of Artificial Sequence: Synthetic polynucleotide
ttttatgacgtcgaattgtttgggggatcgttagcggtgcgtcggtcggagttagttggtggcggggcgggcggttcggagtgtttgtttaattttgagcgttcgcgagggggaggggaggtagttggttacgggttagggggtagtaaggtggaggagcgggggttgggaaaggggagggtatttttcgggttgtttgtt

SEQ ID NO: 10501 - DNA, 201 bp, Artificial Sequence
  Description of Artificial Sequence: Synthetic polynucleotide
ttttttcgttttagttagacggggcgttcgcgttttttttttcgtttcgcgttggtttttaataggaagtcgtttcggtttttagtacgtgatttttatcgtatttgtatatcggagggcgaattggttaatcggtattttgtatttgagtttttttttcgcgcgtttttttcggtttattggtttttcggttaggttacg

SEQ ID NO: 10502 - DNA, 201 bp, Artificial Sequence
  Description of Artificial Sequence: Synthetic polynucleotide
gtcgttatcgttatcgtagttgtagcgtttttttatatttttagcgcgtcgtcggtcgggtagtttggtcgcggtacggaggaggggttttggagggggcggtcgggggaggcgacgtcgagttatcgttttcgggtagtcgtcgtcgggggggagcgcggagatttgaaagggcgcgtcgggtaacgttttttttttttt

SEQ ID NO: 10503 - DNA, 201 bp, Artificial Sequence
  Description of Artificial Sequence: Synthetic polynucleotide
ttattgttttttgggcggtgtggattagttgtagagtgtgatttgcggttagggagtgttttttcggagttttcgtttttagatttttggtgttaaagacgttttgtgagcgggtggggtcgggcgttttagttacggcggtcgtcgtttttttttttcgtaggacgggatagcgtttttgtggatcgcgttttagatggg

SEQ ID NO: 10504 - DNA, 201 bp, Artificial Sequence
  Description of Artificial Sequence: Synthetic polynucleotide
cgtggaggcgataggcgtcggcgataattttttagttcgggcgtcgcgcgtcgtttcgcgggacgcgtattggggatttcggtcgtttttttcgtttttcgcgcggatataaagttcggtagtcgcggcgtttagagggtcgagggttatcggatagttcgggtagattttggattcgtttcgcgggagttgtttttttgt

SEQ ID NO: 10505 - DNA, 243 bp, Artificial Sequence
  Description of Artificial Sequence: Synthetic polynucleotide
aaggttggagggtgttagaaagatgatcggtcgggtacggagcggggagttcggagtcgcgcgtggggaggggaggtggaggagggggcgtcgggggagcggggggcgcgtgaggggtgcgagcggggttcggggggcgcgcggtgggtgtggggggcgtcgggtttatttatttttcgttagcgtcgttattgtcggttatatgattgaggttgttgttgggatgacggttcgggttttagt

SEQ ID NO: 10506 - DNA, 201 bp, Artificial Sequence
  Description of Artificial Sequence: Synthetic polynucleotide
ttttgtatttgtaatttttcggggtagtgatatagttggtttcggtgttttggcggagggtagaagtgatggtcggttgcggttttgtagggtgagaatcgggttagataagtgagtgttttagagtcggggagttgtatacggaggggagggagtggcgggcgttgcgtcgggtttttttaggaagaggtgagcgggttg

SEQ ID NO: 10507 - DNA, 201 bp, Artificial Sequence
  Description of Artificial Sequence: Synthetic polynucleotide
cgaatgtggttaagggggtcgtttagatgggtgtagatacggttaagatcgtgttgatcggtattaaggatattgtttgtagtggggttatcggtgttgcgaacgtggttaagggtgttgtgtaaattgggttgaaaacgatttaaaatatcgtaataggtataaagaatatttttggtagtggggtgatcggtgttgcga

SEQ ID NO: 10508 - DNA, 201 bp, Artificial Sequence
  Description of Artificial Sequence: Synthetic polynucleotide
gtcgcgtttttgggaacggttagggaagtaagtagaagtcgggaagtcgcgaaagaggcgagaaagtgcgattttttttttagattttcggtttttcgtcgaaatttttgtcggtcggttaaattttagataatggaagttttacgtttttatttttatttttttttataagttcggtcgcgggtttttttcggttcggga

SEQ ID NO: 10509 - DNA, 201 bp, Artificial Sequence
  Description of Artificial Sequence: Synthetic polynucleotide
tgtgacgattttttaagggggttttgtgagtattttttttttatagttaggaaattgaggtatagaagggagggattgtttggtaggagttaatagaggcgtatagagtagcgtgatgagtttcgggttttgggggcgggttcgcgagtaggtagtttttattttatggtggatttttaggtttttttttttgtttcggtt

SEQ ID NO: 10510 - DNA, 201 bp, Artificial Sequence
  Description of Artificial Sequence: Synthetic polynucleotide
tacggagtttttttacgcgtttattgcggtttcgtcgtgttaaggggagtttggttgtttacgggttttatttgttagcgagaagatagtttggtcgggcggttgattttattttgtaattttgatattgtgtttttcgggtttgtcggttttatgatttgtgtttaaagtttgatttttcgtagattaggtaaaagttaa

SEQ ID NO: 10511 - DNA, 201 bp, Artificial Sequence
  Description of Artificial Sequence: Synthetic polynucleotide
ttttgtgtttttacggcgcgtagaggcggcgtcgcgaattttgtgtgtattttatacgacggcggggattgaggtttttcgtagtttagagtcggagttcggggtcggtcgagttcgtaggatcggttttttcgtcgatttttacggttttatttagttttttgggtttatggcggcgtcggcgttggtgagtggagggtt

SEQ ID NO: 10512 - DNA, 201 bp, Artificial Sequence
  Description of Artificial Sequence: Synthetic polynucleotide
ttatcgtagtcgatagttttataaatattatcgttcgtttagttttcgttttttcgggtcggttgttatttcgcgttttcggtttggttttggtttcgtcggttgtattgtacggttcgttttttcgtttatttgtttattaattttgtagacgttttgtgtttattttttttttttttttggttattttttttttttgtt

SEQ ID NO: 10513 - DNA, 201 bp, Artificial Sequence
  Description of Artificial Sequence: Synthetic polynucleotide
ggcgtttttttcgttcgtttgcgggttcgttgcgttagtcgtcgtaataaagtttgatagggcgtggtttcgcgggaagcgggttcggcgttgttcggtcggggcgtaggcggttcggttcgggttttttcggtagcgtcgagtttagggttttttaattcgttatcgtcgtcgtttgtttcgtcggggcgttttagtttt

SEQ ID NO: 10514 - DNA, 201 bp, Artificial Sequence
  Description of Artificial Sequence: Synthetic polynucleotide
aaaataaaggatgggtgaataaattgagattcggtttgttgggcgttatgtggagatcgtgtgtaggaagagttaagatattagagtcgggggggtttcggtgatttttgtcgttttttgtattttgggtttatggttggggtttgtttttttttagttggtagtgttattttttttgtgttttattaagtttattagtaa

SEQ ID NO: 10515 - DNA, 201 bp, Artificial Sequence
  Description of Artificial Sequence: Synthetic polynucleotide
tgtcgtggtttcgggttattgtagtttttttgtttcgggttttcgtggtttttttgtttcggtttgttaagtgtttgggattgcgggcgggcgtcgttacgtttgattggtttttgtatttttggaggagacggggtttcgttttgttgatcgggttggtttttggtttttgatttcgagtggtttgttcgttttggtttt

SEQ ID NO: 10516 - DNA, 233 bp, Artificial Sequence
  Description of Artificial Sequence: Synthetic polynucleotide
agtattcgatttgtgaaaattacgtttatgtagtaatataattggttcgaaagcgttaaagagttaattaagaggttttcggtttttcgtagtttatagcgtagttcgattttttagagtcgtcgagtagacgttcggtgaattttagaggcggcggagggtggcgaggagttttcgttttttttcgtttttttttttttcgatttcgttttttttttttttttttttttttt

SEQ ID NO: 10517 - DNA, 201 bp, Artificial Sequence
  Description of Artificial Sequence: Synthetic polynucleotide
tcggagttgtagtagaagcgttttcgatttcgtttaggtttttagtttatttttttttgaaggtcggtagggggcgttattatcgttggttttttcgcgcggtttcggttttcgtttcgggaatcgagtgtttgtagttcgcgattttggggaggtatagggttagggtatcgtttcggcggagaaagtggttgtgtcgcg

SEQ ID NO: 10518 - DNA, 201 bp, Artificial Sequence
  Description of Artificial Sequence: Synthetic polynucleotide
gggggacgggttagttagggtaggagtttaaggatatgaggtaaagattttaggttgggatttttcgtagttcggaggcggggggtggggagggagggtcgggggggtgttgggcggagacgttgggtattggggttagcgttgggtagttatgtacgggggcggggtaataggtaggttagttgttgttgttttttagga

SEQ ID NO: 10519 - DNA, 201 bp, Artificial Sequence
  Description of Artificial Sequence: Synthetic polynucleotide
aagttcgtgtagcgcgcgtcgttttattaacgcgtttcggcgtaggcggtagaggaaagcggtttttacgcgcggcgttcgcggtttcggggttaggggcgcggttagtagtgttagtacgttttttattacgtcgtcgtcgtttttttcggcggtggtcgagatcggggcgaggttcgtagcgatcggttcggcggggtt

SEQ ID NO: 10520 - DNA, 201 bp, Artificial Sequence
  Description of Artificial Sequence: Synthetic polynucleotide
taggaatgagtttgttgagggtttagtttcggggtcgggagtttgttgtaaaggatatgaaaaatttttattattatttttgtatgtgaaaagaatatgcgtgttggaaataattttttaatttatatatttttaaatatttgtttagatttataggagaaatatttttattgatttttgtataaagtgtattggaggaaa

SEQ ID NO: 10521 - DNA, 201 bp, Artificial Sequence
  Description of Artificial Sequence: Synthetic polynucleotide
ggggcggggaggagggcggagggggtgtaaattaagtggtgggaaagagataaaggaagagtgaagagcgagacggtgcggatggggaagggggaggggcgcggaggggtagtcggtgggtagcgcgtcgaggagttcgagtttgaatttgattaagtattgggggttttgtcgtgggggtggggcgggggtacggtcgag

SEQ ID NO: 10522 - DNA, 201 bp, Artificial Sequence
  Description of Artificial Sequence: Synthetic polynucleotide
agtttttaagggaggaggggagagttgtagagaggaggaggggtcggggaggtcggttttataaaggcggttggaataattttgttcgttagatttcgtcgttcggattttttgagttgttcgttattttacgtgatcgcgtcgttttttagttttatcgttgagtgagttggggcgcgtttttatttcgtttttagtttt

SEQ ID NO: 10523 - DNA, 201 bp, Artificial Sequence
  Description of Artificial Sequence: Synthetic polynucleotide
gaggagtagtagcgttcgtcgggggatgtagtagcggtagcggcggcggcggcggcggtagcggtagcggcggcgcggagttttttgcgtttagcggttcggtcgggttgcggtagaggcggcggcggcgtttcgtttcgggtgaggttgtcggggtcgtgcgcgttggtgagtggggcgtggggggtaggtgggtggttg

SEQ ID NO: 10524 - DNA, 201 bp, Artificial Sequence
  Description of Artificial Sequence: Synthetic polynucleotide
gttcggagaagtggatttcgttttatcgagaggttagggtttttatgttttcgttttcgatttcggtttagtggtttttgtttttcggattgttttcggcggggcggggttgtatttcggagttttagtttatttcgtagtttttttcgtatttgatattatcggttattttttataatatggcgttcggcgttttttaaa

SEQ ID NO: 10525 - DNA, 201 bp, Artificial Sequence
  Description of Artificial Sequence: Synthetic polynucleotide
ggaatttggaggaatatggcgttgtcgttttttggcggaagcgttcgggtttgcgggtaggggtagttttttagggttcggaggcgtagtgaattttcgcgagttcgtagttcgagtttcgcgttttcggcgtttttgagttcgtttagcgttgtttgcgtttttttttttttttcgttcgtcgttttttttttttttttt

SEQ ID NO: 10526 - DNA, 201 bp, Artificial Sequence
  Description of Artificial Sequence: Synthetic polynucleotide
gttagggatcgttttttattgttttttggttgtcgaggagcggttatcgggttcggttttagtttttttgttttgatttttttttttaagtttttatgtcgagttggagagcggtttttgagtacgtatgtggttcgaaaggtggtagttggtcgggtttgggttttttatgtgatttagttatgcgagggatcggttgaa

SEQ ID NO: 10527 - DNA, 410 bp, Artificial Sequence
  Description of Artificial Sequence: Synthetic polynucleotide
agatatgttgggttagtagtgttggttttattttagattttttttagttttttttagttagtcgttaaggggtttttttaatcggaaatttttaattcgcgatttcggcgggtgtatcgtcgagtttttcgggaagtgtagttttagcgcgagcgggacgttgggaaatgtagttttgcgcgtttacgttttcgatcgggtcgtgttcgtcgcggttttgcgaggttcgaggggtaagggagcgtgtagcgggggcgggattacgaggcggcggggttgggggcggtttttgtgtttgcgtcggggatcgcggtgatttcgttgcggatcggttcgcggtgattttagcgcgaacgagttggttgtcggttggggcgagaaaggtttgcggatcggtttgggcgtatgcg

SEQ ID NO: 10528 - DNA, 201 bp, Artificial Sequence
  Description of Artificial Sequence: Synthetic polynucleotide
gagttagagatgtatttttggtcggtttgagtatttgcgggaattttgtgagtttttgaggtttattttttgttttttattttttttttttgtaaatttcgagttcggggtaaagttgttttttttttttatatttttttttaattcgataattaacgttttttagttttcgggaatgggacggattttttttaaggattt

SEQ ID NO: 10529 - DNA, 201 bp, Artificial Sequence
  Description of Artificial Sequence: Synthetic polynucleotide
gggatttttcgtttttcggtttagggggtatttatttcgtacgtggagttcgggtagcgtttttagacgtatttagcgggatatcggagaggacgtcgacgtagtgtaacgtttcggtcgaagcgtcgaataatatgcgcgcgtcgcggaggaggtgcggggcgtgttcgtttaggtagcgggtcgtttcgacgtggtaga

SEQ ID NO: 10530 - DNA, 201 bp, Artificial Sequence
  Description of Artificial Sequence: Synthetic polynucleotide
atgtgttttgtcgagttgatttgtttagtttattttttattttgaaacgacgttaagtatgaagaagagttgtataaataatgttaataatttcggtgtcgtttttatgggggttatggtggttttagtgtattttatatgttttttttttttttgtttttttttttcgtgtatatatatattgttttttgatttaagagt

SEQ ID NO: 10531 - DNA, 201 bp, Artificial Sequence
  Description of Artificial Sequence: Synthetic polynucleotide
gtgattttgcgaggttatatttcgggtgcgtcgttgcgggttcgtgggttcgtgggttgtagtttttcgtttttgtcgggtggacgagtttcgggttcgcgtggagttgttcggttaaggtcggttcgggaggggcgcggcgtagggcgggtaggggcggggttttaggttaacgtttagttttagatttagtttcgtcgt

SEQ ID NO: 10532 - DNA, 201 bp, Artificial Sequence
  Description of Artificial Sequence: Synthetic polynucleotide
ggagggagaaagggagagagttttagtcgtttcggttgtggtaggaggagttttaagagcgtttttcgagttcgtttcgtatttttaggtttagttcggcgtaggttttttttttcgttttttttattttcgttagttgttgaaatttttttatcgttttttcgcgggtaatagtgttcgttaggcgtcgtcgcgcggtgt

SEQ ID NO: 10533 - DNA, 201 bp, Artificial Sequence
  Description of Artificial Sequence: Synthetic polynucleotide
gtttttaatgcgggcggttttcgtattttacgcggttcggggtttttgtttatttttcgcgggcgggtttcggatttttggggttttttagttttttttcgtttttttttcgcgtcggtttcgtgttttgcggttcggcggtttcggcggcgcgagtcgggggaggcggcgaggggtgttttcgaggttcggcggcgcggt

SEQ ID NO: 10534 - DNA, 201 bp, Artificial Sequence
  Description of Artificial Sequence: Synthetic polynucleotide
ttcgtattttttttgatttttatggatatttagttaatagtaggaataaaaattaagatttttttttttttattcgtttggatatttattttttcggttcgcgtcgtcgtgttttttattcggttatatagcgattttaaaagtttagtttttatttcgcggagatttcgatagttttgggaggttttttttaaaagggaa

SEQ ID NO: 10535 - DNA, 201 bp, Artificial Sequence
  Description of Artificial Sequence: Synthetic polynucleotide
agtcgttcggttgacgtgataagggaggtgtaggttaatacggcgatttcgcgttttttggcggtagtgtcggagtagcggcgttgtttttgatttattcggtattcggttttcgggatcgtttggcggttgtgaatgtagagttggggcgacgtggggttcgttttttgggattgggtgtgagtttgcgtagtgagttat

SEQ ID NO: 10536 - DNA, 201 bp, Artificial Sequence
  Description of Artificial Sequence: Synthetic polynucleotide
aattgaacgtttgaaacgaaggtggcgcggtttggataaatttgatttttcgatatttttcgtttttgcgttcgttttcgttaagcggggaggagcgatcgttataatggattttttcgtaggttttgtgcgcgttgggaatttagttgtcgtcgtttcgtagagttttttgttttcggagggcgtttattttcgggtcgt

SEQ ID NO: 10537 - DNA, 201 bp, Artificial Sequence
  Description of Artificial Sequence: Synthetic polynucleotide
gtttcgggcgtttgttgtttcgtgtttttatcgacgattttatttagttgcgttacgcgtcgtttcggttgtcggtcgcgcgttttgttcgtcggttttcgttcgtaatcggcggtttagggcggattcgggtttttgcgttttcgcgagaagcgcggcgttgcggggtcgtgggcgtttgagttcgcgcggttttcgagg

SEQ ID NO: 10538 - DNA, 294 bp, Artificial Sequence
  Description of Artificial Sequence: Synthetic polynucleotide
ttcgtcgtttatgtttttattgtaaggtcgtagttttcgtcgtcgatttcgatttttcgtttcgtttagtcgcggtttcgttcggcgtttttttttcggtggaagtttaagtttaattaattgagttcgaggcgggagggaagggttttgcgcgtcgtggttcgtttcgtttttttttcgcgttttttttttcgttttgggtggtatttttttcgtcggtatttataataagtcgttgattaatgaggtcggggtcgttttatttcgttcggtcgggtcggggttttcgcggga

SEQ ID NO: 10539 - DNA, 201 bp, Artificial Sequence
  Description of Artificial Sequence: Synthetic polynucleotide
taagtttatagaagagtaaatttttatttttcgaggttgttgtggaagttatcggggttgggatagtagagaggaatttagacgggaatatcgttttttcgttagattttcggcggtttttttttttttttttaaatttatttttaaagttaagtgtaggttttttcgttttagttagaagcgttgcgtgagtttttatac

SEQ ID NO: 10540 - DNA, 201 bp, Artificial Sequence
  Description of Artificial Sequence: Synthetic polynucleotide
gaggtttacgttttttagatcgttatagtcgttgttatagggtttgagtttgggcggcgtttcgtttcggtcgtacggtgcgtcggcgttaatttttttcgaaggtttcggtagttaagattgtaggtttttattaagtattgttttcgaattgggttacgagagcgtgtttttgattggtttgttttggaggttgggaag

SEQ ID NO: 10541 - DNA, 201 bp, Artificial Sequence
  Description of Artificial Sequence: Synthetic polynucleotide
tttttcgcgcgtcgttttttttcgtcgtcggtcgcgtgcgttttcgttttttttttcgcggcgggagtattttcgttcgttatttggggattcgcgtcgcgtttttcgttttcgttcgttcggcgtttatttttcgcgttttttgttcgttggggttataattgttttttatttttcggaggggttattttgggggtggtt

SEQ ID NO: 10542 - DNA, 201 bp, Artificial Sequence
  Description of Artificial Sequence: Synthetic polynucleotide
gcggtttcggtgagcggggcgaggggcgggtgggtagcggcgtcgggggaggtcgaggaggcgaatggtggtgtcggggcggcgggtatcgggcgaggtcgcggttagttttttcgggtcggagttgggtatcgcggggacggggagtgtcgggggtaggtgaggttagggtaggagtttacgcggtgggtgcgaaggttt

SEQ ID NO: 10543 - DNA, 201 bp, Artificial Sequence
  Description of Artificial Sequence: Synthetic polynucleotide
ggaggcgttgcgttaggcggaggaggagcgtaaggttaagtacgttaagatggaggcggagcgcgaggtcgtgcgttagggtattcgagataaggtgcgcgtcgggtcggtttcgtttgcgggaaggcggttttgagtttagcggggatttagatttcgtttgggtggaaggggttgttcggaagaggggcgggcgttttt

SEQ ID NO: 10544 - DNA, 201 bp, Artificial Sequence
  Description of Artificial Sequence: Synthetic polynucleotide
aaagagaaaagaaatagataaaattagggtagggggtaaaaaagtttttcgcgtttttcggaatttagcggtcgcggtcgcggttatcgtcgtcgtcgtcgggggtgggtttcggaagagtttgtttagtagggaaggggaggacgggttaggagcgaaattttgtaggcgaggaagggatagacgcgtaaagaaaaagtg

SEQ ID NO: 10545 - DNA, 201 bp, Artificial Sequence
  Description of Artificial Sequence: Synthetic polynucleotide
cgcgggcgtagcggcggtcgggtacgaggtcgggttgatattattatttgttggggcgcgggaagaacggtagttgttttgcgttgtttcggcgagggacgtttggaaaaggttgaagttttgggcgtttttaagttcgttatttacggggttttcgttattttagtttgttcgtcgtcggtcgttttttgtgattttttg

SEQ ID NO: 10546 - DNA, 201 bp, Artificial Sequence
  Description of Artificial Sequence: Synthetic polynucleotide
ttttttagggatggttttgtgtttgggttttttttttttttaaatttcggggtggtttttgttttattagattgaatcggttttaaggagaaaagttgacgattattttgttttagttttcgggaagttttgttttataaagaataagagtttttggttttgtgaaatgagttataggttgttttgattatgtttatttgg

SEQ ID NO: 10547 - DNA, 201 bp, Artificial Sequence
  Description of Artificial Sequence: Synthetic polynucleotide
ttttaaatttcgatcgtcggtttggcgcgcggttgcgtttatcggtttcgcgttgttgtcgtcgttatcgttatttcgtcgtcgtttcggttcgcgggtcgtttaggttagtattcgggtcggtttgttttcgtcggtcgttcgggtgttcgtcgtcgcgtcgcgtttcggtcgggcgtggatggagggcgtcgcgcgttt

SEQ ID NO: 10548 - DNA, 201 bp, Artificial Sequence
  Description of Artificial Sequence: Synthetic polynucleotide
cggtcggatttttttttagattgtttgcggtttgaaggggttaggttcgcgtaaggttttaggttgtttgggcgtcgggtcgtattgttaggagttgttcgggagtggttttttaggaatattaggtattgattatatattaggggttgggaaattaggtggtttgtattaaggcggtttcggggatttgtttgtggtaag

SEQ ID NO: 10549 - DNA, 463 bp, Artificial Sequence
  Description of Artificial Sequence: Synthetic polynucleotide
agcgggcgtttcgtagtcgtgttagcgttacgttgtagtagtcgagtattagttcgaaaggaagtacgaaagcggttagagtttttaggtttaggtgggcggcggcgtggatcggcgacgggtggtatagttggtatacgcggtttttttataggtggcggtagacggcggtcgggacggcgagtaatagggcggttagttagatcgttagtagtaggcggcgggttagggtcgggttgcgtagtcgaggcgttaggaaggggcgggtgattgcgaggtagcgttgtaggttgagtaggtcggtgagtagtacgttggcgtatatgttgagcgcgtatacgtagtatatcgttttgtagttcgtttggtttagcggttaggtttgtcgggttaggaaggttataaagagcggcgtgagtagtagtatcgcgtcgtcggttagcgttaggtgtagtataagcgt

SEQ ID NO: 10550 - DNA, 201 bp, Artificial Sequence
  Description of Artificial Sequence: Synthetic polynucleotide
ggggacgttagtggattggagtcgcggagtttcgagggaaaaattttgtaggcgtcgcggtcgggattcggttacggttttagtttattttagtaggtgcgggaggaagaggtagcgtcggagtttcgaggttagagagtttcggcggcggcggtcgtttttttttttcgagttggtttgaagtcgttgggtattttcggt

SEQ ID NO: 10551 - DNA, 201 bp, Artificial Sequence
  Description of Artificial Sequence: Synthetic polynucleotide
agggttgggaggatttgtagtttttttgttggttttttttttttaggaagtcggttagtttggagtcggttgtttatttcgatttatttttcgtttgggcggagtaggaatgtggaagttggttcgaaaggattgtgtttttttttcgttaaatatttttttttcgcgttttttattaagttttggtcggggttgtggagc

SEQ ID NO: 10552 - DNA, 201 bp, Artificial Sequence
  Description of Artificial Sequence: Synthetic polynucleotide
agggcggagttttcggggtagaggcgtttcgcggtaagatcgtcgaagtgggtttcgacggttgggtcgttgttttcggggggtcgaagggtgcgggttcgggtttcgggggtcggggttttttttttagtattacgaatttgacgtcgtcgagtttttttattatcgttacgttgttgacgaattgtttgaagcggtttt

SEQ ID NO: 10553 - DNA, 201 bp, Artificial Sequence
  Description of Artificial Sequence: Synthetic polynucleotide
cggaggaggttgcggggggtttcggtttaggcgaaggaagggtaagaggttgttcgatcgggggcggcgtcgggaggtgggtgggtttaatatttaggtcgggggaggggtttaagagatatcgggaagggtagtcgagttttaggggcgggtggggtggtagttgtgtgtagtaggggatagggttgggtttttggaagt

SEQ ID NO: 10554 - DNA, 201 bp, Artificial Sequence
  Description of Artificial Sequence: Synthetic polynucleotide
tagtcgatatgacgcgcggcgtagttaatgggaggcggagttggcgttttttggtcgggggggggtcggaggggtgggtttcgcgttttcggtgtttgtcgtgtttattgaatggagagagcgagcgtcggttagtttattcggtcgtttcgtgttttagtcgtagtcgtcgcgttttttagtttagttttaagtcggatt

SEQ ID NO: 10555 - DNA, 201 bp, Artificial Sequence
  Description of Artificial Sequence: Synthetic polynucleotide
ttttttttaagtttttttttggggattgatattttattagtatagagattaataatgttagataagagatttttgattttatatttggggttttcggaacgatgtttgggagagaaaatatgacgttttttgtagaggcgaattttagttcgggaggagggaggtcgttgggatgtgtcgtcggcggtttttgggttcggt

SEQ ID NO: 10556 - DNA, 201 bp, Artificial Sequence
  Description of Artificial Sequence: Synthetic polynucleotide
agattggattcgaattcggtttattttattcgagcggcgacgttagcgttgattttaggcgtgtttcggttttcggcgcggtttcggtttaatcgtgtacgttcgcggaaggtttcgtattcgcgttagaagtggtttgttcggggttatcggttcgtaagttttcggtgttttcgaggtttttgtttcgtttcgcgcggt

SEQ ID NO: 10557 - DNA, 201 bp, Artificial Sequence
  Description of Artificial Sequence: Synthetic polynucleotide
ggggttggggagggttgtcggcggcgcggcggggtcggcgggaggcgggaggttgcgcgcggcgcgggagcgtgcgtcggggttagtaggggcggggttcgcgcggtcgtcgggattggaggcgcgggggtagcgggtagggtattttgagggtatattttcggttatttggcgggagatttagttttgtcgcgcgtcgtt

SEQ ID NO: 10558 - DNA, 201 bp, Artificial Sequence
  Description of Artificial Sequence: Synthetic polynucleotide
gtttcggtcgtcgggcgcgtagtcgtttttttcgcgttttgttcgtttttatggtattttttaggaacgggaagggggtgggagtcgagtcggcggtcgcgtcgcgtcgaatgtgtgttttttttttcggttgtttacggcggtcgaggcgtattgtattttgttggcgtcgaagggtgttttggaatagtagagggagga

SEQ ID NO: 10559 - DNA, 201 bp, Artificial Sequence
  Description of Artificial Sequence: Synthetic polynucleotide
tttagtgttgttcgggcgttttttcgtagtagttttagggcgaggaggatggggggggttttcgtaggggttatattgtcggagttttacggattcgggcgggacggtgaggtttttatattgagtcggtggtaaagttttcgcgaggatgaaggaggaatttcgtgttttttattttattaggtttcgtattttttggtt

SEQ ID NO: 10560 - DNA, 258 bp, Artificial Sequence
  Description of Artificial Sequence: Synthetic polynucleotide
ttttttgggataagaagtggagtggggcggttaggacgcgggtcgtggggatcgcgagggaggagggggcggtcgttcggatttatttcgtggggttttcgcgcgcgggcgtttcggcgtgtcggattatgtcgtcggtagtttcgggacggggaacggaggcgtttaggcgtcgggtcgcgcggaacgcggagtttcgggcgttcgtatgtttttggttttggttttttggaagggttaggtcgtcgttgtcgtcgc

SEQ ID NO: 10561 - DNA, 201 bp, Artificial Sequence
  Description of Artificial Sequence: Synthetic polynucleotide
ttcggtcgttacgtttttttcgagggtcgtttcgttttcgtcgggtttcgcgagcgcgcggtgggggaggggagggtttcggagcgcgtttgcgtggggcgggggcggtagtcgattaggggttgggtttggtcgtttagggtcgggttttggttcgtcgtttacggtgcggagggttggtgggttttttttggtcgtcgg

SEQ ID NO: 10562 - DNA, 201 bp, Artificial Sequence
  Description of Artificial Sequence: Synthetic polynucleotide
tagtagttttttagagttttggtttggtagggaggggacggcgttcgagtagttatattgtagtttttcgggtttttttttcggtcggcgtaggtttcgcgtttacgattttttttgggagtcggatttgttttttttatcgtcgttattcgtcggtttttgcgttttttggttttcgatatttcgtttggtcgttttttt

SEQ ID NO: 10563 - DNA, 201 bp, Artificial Sequence
  Description of Artificial Sequence: Synthetic polynucleotide
ttttcgcgttatttcgggttcgttttcgttcggttttttcggagcggtcgcgtttttagtcggggagtttaggggttttggttcgcggagtcgggcgcgcggggggcggttggggtcgtagtagggggaggttcggcgttcgtagtcgtcggcgcggggtttatcgggcgtgtgggtttatttcggtcggggcgcgacggg

SEQ ID NO: 10564 - DNA, 201 bp, Artificial Sequence
  Description of Artificial Sequence: Synthetic polynucleotide
gggtttttagtacgcgttttagcgtcggagtagggttagggtttttttgcgattcggtttcgttttagatttttttagttttcggtcgcggattcgggtcgcgtgtgagcgttttttgtattttttatttttagggttcgtcgagagttacgattttttatagaaaatgagcgataaagagattttgtattgttttgattg

SEQ ID NO: 10565 - DNA, 201 bp, Artificial Sequence
  Description of Artificial Sequence: Synthetic polynucleotide
tcgggtttagggcgtcgtttgtagttgcgcgcggtcgtttttagatggaatttttttattaacgtaaggttcggtcggagtagttattcgggagttgggcggcgaggggttatttttttttatttcggcgggtgtaggatcggggggtttgggtagtaattagtggggaggagcgttggattgtgtacgtcgagttcggta

SEQ ID NO: 10566 - DNA, 201 bp, Artificial Sequence
  Description of Artificial Sequence: Synthetic polynucleotide
ttcgttttattttttgtttgttttcggttgttagagatttaggtgtagagagattttagaggtggcgttcggggttttggcgttttttttgcggacgttcgttgtagagtaggaagtcgtcgtttcggggcggaggggcgagtcgggttagggggtcggggtggagaggtttgtagggtttgcgcgttttttttattcgcg

SEQ ID NO: 10567 - DNA, 201 bp, Artificial Sequence
  Description of Artificial Sequence: Synthetic polynucleotide
agtattaggttcggtttttcgtatatcgtttcgaatttcgggggtacgggcgcgggtttttcgggtttttcgggggacgcggggtttttaagttaaacgcgcggttcgggggacggcgtcgcgggttttttcgggtacgcgcgttttttaggggacgcgagttttttcggggacgcggcgttcgcgttgtcggttttttat

SEQ ID NO: 10568 - DNA, 201 bp, Artificial Sequence
  Description of Artificial Sequence: Synthetic polynucleotide
ttttcggtcgaggaggggtcgcgtggcgtcgcggggggcgggtcgcgtacgtttttcgtagggaggatttagggatagttagggtttcgggagagttcgcgcgtatcgttcggtttcgcggcgttagttatggcgttcgtgcgtggtttcgttagggatggggcgacgcggttagagtcgtacgcgatcgaaattcgtatt

SEQ ID NO: 10569 - DNA, 201 bp, Artificial Sequence
  Description of Artificial Sequence: Synthetic polynucleotide
gttagaaaggatcgagaaaaattttaaagttttaagtttgagttagggagggttttagagggaggtttgattgtagatcgggagtttttttttttcgtgcgtcgttgttcgggacgagaaattcgtggggtatttaggattaggatacgaggttttagtttgggtaggtggataagttgtggggttttatttttcgtaggc

SEQ ID NO: 10570 - DNA, 201 bp, Artificial Sequence
  Description of Artificial Sequence: Synthetic polynucleotide
gtcgttgagtacgcgttttaggtaggttttgggaagttcgggatggaagtagttttttttttttcgtttttttttttttttttttttttttttttttttcgcgtttttttttttttttttgttttttttggacgtgggttgtcggttgtagttcggagggacggggcgcgggacggagtttttcgcgggaggaggggtcgg

SEQ ID NO: 10571 - DNA, 203 bp, Artificial Sequence
  Description of Artificial Sequence: Synthetic polynucleotide
gtaggagcggttcgtgttcgcgggcgggagcgtgcggtttggattgtttcgtcggataggtattgttttttcgttttttcgggttcgaggcgggtcgcgcgcgtcggtcgtcgttcgggcgtttcgcggtgggcgagatgcgtcgcgttcgttttatgtttgtcgttcgcgcgttttttgttttttatttcgtagtcgttcgt

SEQ ID NO: 10572 - DNA, 201 bp, Artificial Sequence
  Description of Artificial Sequence: Synthetic polynucleotide
tttttcgtagagggtaggatatttattttttcgtgtatttgtttttttttcggtttttcgtttttagtagtattttaggatttaggggtgttatcgggtcggggagggaggggttgagtttgggtttggggatatcgggatagggggaggggttggcgttttcgtttggtcgggatttcgtggtttagcgcggttttacga

SEQ ID NO: 10573 - DNA, 201 bp, Artificial Sequence
  Description of Artificial Sequence: Synthetic polynucleotide
agcgtttgtttaatttgtagtgatatcgtttagttgtttagggttttagttgttatagttaattagttcgcggtcggggaggagcgtcgggtaggggggcgggggggtatgaaggggtcggcgggggaggttgtgggggttgtaggaggggtaggcgtaggaggaggtttgtggtttttaggttcggttcgtttttttagg

SEQ ID NO: 10574 - DNA, 201 bp, Artificial Sequence
  Description of Artificial Sequence: Synthetic polynucleotide
gggcgtattgggcgaaggcgacgcgcggttcgtgggtgtagcgttgggcgttttgaggaggtttttgttgcggtttcgggcgtttgtgcggtttttgagcgcggagttgggatcgcgttttttttcgttattggacgacgtgagtaaacgtttcgttttcgggtttcgtttttgtcgttgttatcgttttcgtttttttag

SEQ ID NO: 10575 - DNA, 201 bp, Artificial Sequence
  Description of Artificial Sequence: Synthetic polynucleotide
taggtagaggggggcgggagggggtgtgagggagaggaggagtcggagtcgtcgttgcggtttttttcggggaggggagaggagaatttttttttttttcgtttttttttagtttttcgttggttcgggagggggtggggcgtcgaggtcgcggcgattcggtagggtttggtcggtgaagagtaggcgggcggggtgcgg

SEQ ID NO: 10576 - DNA, 201 bp, Artificial Sequence
  Description of Artificial Sequence: Synthetic polynucleotide
ttaattttgcgttttttttttagttcgagttttttcgttgtttttttttttttttttttcgagtttttttttttttggcgcggcgtcgttagttagtttcggcggggagagtgtaggtattttgtttttagaataattagtaggatttaagtcggtttttcgagcgcgttttttttttttttttttgtttttttttttcgg

SEQ ID NO: 10577 - DNA, 201 bp, Artificial Sequence
  Description of Artificial Sequence: Synthetic polynucleotide
cgcggacggcgttcgatagtagttggaggagcggtttgtcgatttggcggcgagttatttggaggttattcgtgcgcgggacgagtgggatcggtagaacgcgcggttgcgttaggagaacgttcggttgcggttcgagaatcggcggttgaagcgcgagaatcgtagtttttttcgttaggttttgcggtttttcggcga

SEQ ID NO: 10578 - DNA, 201 bp, Artificial Sequence
  Description of Artificial Sequence: Synthetic polynucleotide
ttcgttttttcgttttagttcgcgtatttatcgcgtacgtagagtagtgatatggtcgaggatcgggtaagtttttgtcgcgttttagtcgcgtcggatcgttttttttttttttttagtaggtgtcgcgattgttttcgttatcggttttacgggtttggtagttttttatggtttcggtcgtaggtagcgtttcgtcgt

SEQ ID NO: 10579 - DNA, 201 bp, Artificial Sequence
  Description of Artificial Sequence: Synthetic polynucleotide
tggttattgttgcgtaggcgtagttttgggagcggcgggagttggaagtttaggagttttagggggcgtagggtcgggtagaaggcggcgagttgggggcggatatttatcggggattggaagcggttcgcgtaggttggggatattcggggttagggcgggtcgtttggggtgggagagtatagtgaggaagtttgacgt

SEQ ID NO: 10580 - DNA, 201 bp, Artificial Sequence
  Description of Artificial Sequence: Synthetic polynucleotide
ttggggacgtcgtagttcggttcggggagggggcgttaggtcgggagtcgtagcgcgggagggacgagttcgggtcggcggggggaggggagcgggaagcgtttttgttgttggcgatcgggattttttttcggtataggggaaaggcggggaagttattttttatcgggtttgtgtttttgagaggattttttgatggtt

SEQ ID NO: 10581 - DNA, 201 bp, Artificial Sequence
  Description of Artificial Sequence: Synthetic polynucleotide
ggtttttgggaggcgtcgcgtgggggcgcggttcgtggagttcgggcgttagggatcggtcggggtcggcgtacgggtgcgttttgggttcgttcgggtcgtgggagttagggagttagggagttagggatttcggttttcgtacggggtagataggggtagcgcgggcgattcggagcgtttgcgttttcgcggtttttt

SEQ ID NO: 10582 - DNA, 523 bp, Artificial Sequence
  Description of Artificial Sequence: Synthetic polynucleotide
agagtatcgggttttttattgttttagagcgcgtgtgcggttttgggcgcgtatagtgacggtgacggtatttttggttcggtagcgtcgaggtcgtttcgttagatagttagcggtcggcggtaggtcgggttatgagcggtaggggtcgggtcgggtttcgttgattttggtttcgcgcggtagtttttttagttttcgtttcggtttttcggtatgagagttcgttcgggttcggggttgcggttgttttagattcgtcgtacgttggcgcgtttcgggttcgcggagtcgcggtgttgatatttgcgtcgtattgcgtcgttcgttcgttcgttgtgtgtttcgggggcgcggttatggaggtggtgggtgatttcgagtatagtaagagggatttcgtgggatacggggttttcgtcgtggtttttcgggggcggtatcgttaggtgagcgtcggtcggggcgaggtcgggtttcgggcggtaggtacggggttaggtggttttgaaatttggcgtag

SEQ ID NO: 10583 - DNA, 201 bp, Artificial Sequence
  Description of Artificial Sequence: Synthetic polynucleotide
cggcggtaggcgggggagggggtgggggtgtaggggcggtttcgcgggtcgcggggggggcgcgcggcgtagcggggtttcgggcggggcgtagcgggtcgcggggtttcgggcgcgtttttcgcgttattttagtgttatggtgcgttcgttgagtcgtcgggtttagagttggggttggcggcggagggatacgggtcg

SEQ ID NO: 10584 - DNA, 201 bp, Artificial Sequence
  Description of Artificial Sequence: Synthetic polynucleotide
cgttttttcgttttttcggtatttgtttattttcgtaattgtttcggtttttaatatttgtatcgtttaatttttttttttttcgttttttgtttttttcgtatttgttcggagttttagtatttgtttcgtttttcgttatttttttttttgttggtttgatggggtgtgggtttaagggagttatatttgggcggaggt

SEQ ID NO: 10585 - DNA, 201 bp, Artificial Sequence
  Description of Artificial Sequence: Synthetic polynucleotide
tttcggtttgacggaatataggcgacgtacgtgaagtttaggttttattttagcgtaggcgggtttttagcgatttatagttgttatatattcggttagcgtcgattttcgaaggcgtattttttatattttatttcgagtatcggttttatcgttagggaaggtttttttggatagtaaggtcggggtttaggatttgcg

SEQ ID NO: 10586 - DNA, 201 bp, Artificial Sequence
  Description of Artificial Sequence: Synthetic polynucleotide
cggtaattttttttatcgttttttgtagtaggcgtcgagtcgtcgttattttgtttttcgttttttttttttttttatcgatatttatatagcgaaaatcggttcggtcggtttgcggtttttattttacgtttgtagttttcgttttttcgttaggttttatttcggcgcggtgttttaggtcggtcgcggagtcgattc

SEQ ID NO: 10587 - DNA, 201 bp, Artificial Sequence
  Description of Artificial Sequence: Synthetic polynucleotide
cgtcggcgggcgggaggtatatacgcgcgtataagcggaaagaaagcgggtttattgcgtggggatgttcgttcgcgtagttgtttcggcggcggcggtcgttgtttgtatcgaggtcgaggcgcggcggtggcggcggcggttgcggattgagtttttttcgtcgggcggtggatgtagggcgcgggaggggcgcgaggg

SEQ ID NO: 10588 - DNA, 201 bp, Artificial Sequence
  Description of Artificial Sequence: Synthetic polynucleotide
tttttcgttagcgtttttcgttcgttcgttttttttcggtttcgtttcgcggggttgttggagaaattaagtttggggttttttttgtcgagtacggggcgagttttagaaggttttgtcgtgatggaaaatttttaggtaaattttttcgggttcgtggtttttaggtcgggaagttttcgttacgtgaagggttttcgt

SEQ ID NO: 10589 - DNA, 201 bp, Artificial Sequence
  Description of Artificial Sequence: Synthetic polynucleotide
tttttatatagaaaatttgtattagttatgtaagttaaaaagttgtgtgaatttaggtgtttcggaaaggggttgtaggatatagtaaaatgttagtagcgtgtcggattttttttttttatttttttttttaaagaatagaggttaggaaaaatattggttgggacgttagaagggttatgtgttaattataattatatt

SEQ ID NO: 10590 - DNA, 301 bp, Artificial Sequence
  Description of Artificial Sequence: Synthetic polynucleotide
gcggatggggttttgattagttgtggatttttgttttagcgtatttatttaatcgtgttttttttggttggtagagggcgttaaaggcgacgtgtcggtcgttagttttaggtcgagtttcgagcgtttgtaggaatacgtttttttattcggcgcgggacgtagagttgcgagagaattttgtttagcgcggatttaacgttagggcgtcgtttagaggttggtttttgtttcggttttattcgtcgggagattatagagttgtttttttagtcgttcgtcgttagaaattggaaaaaaa

SEQ ID NO: 10591 - DNA, 223 bp, Artificial Sequence
  Description of Artificial Sequence: Synthetic polynucleotide
ttagagttgtacgtagatgaatacgaagagtagcgcgtagaatacggtgtagacgacggtgaggttaagttttacgtaggggggtacggtcggggttagcgtgggcggtagcgagtcgttgcgggttgggttttacggcggggtttttatcgggtcgggggcgttgtcgcgcggtcggggacgttcgggttttatcggggtttacggtcgtcgtcgttttcgc

SEQ ID NO: 10592 - DNA, 720 bp, Artificial Sequence
  Description of Artificial Sequence: Synthetic polynucleotide
tagttgaatgaatgggggaggaaggcgggcgtcggttttttttcgcgcgttgcgttttcgtttcgttttcgtttttcgggcggattaggttttcgtattcgtatcggtttttttgtttcgtattggttgtttcgttcgtttgttaaggttaggtttggggggttggggttcgagtggtcgttgggggatagttttgggtatacgatcggagcgtttttttttttttcgtttggttcgcgtttaggggacggcgagagacgcggttttagttttttttttcgggcgtttcgttgcggttagatgtgggcggatgtggaggtcgggttatggcgaggagggcgggcgtttagaggggaagagattttttttttttttcgggcgtagggtttttttgtaggaggttgtatttgggtagttaaataaagttttttgttatcgtcgtcgcgcgttttgcgtttgtaagggttaaacggtagcgtacgcggttggtaggtaggatttcggtttgtgggtttaagagtcgaggggcgtagggcgaatatgcgagttttatggtattagcgagaggttattaatttttatttatcgagggtatttttgtagttaatatttttattacgattatcgtttcgggggttatcgttgtatttttttgggtgagttttggagaaggtattgttcgggagaaggggtatagggcggggatggaatacggttgtt

SEQ ID NO: 10593 - DNA, 1683 bp, Artificial Sequence
  Description of Artificial Sequence: Synthetic polynucleotide
atcgagggagggtgtaaaaggcggggggcggagggggggtagattagattaggcgaaatttaataagtttttagttttttagtttaaagtttttattatcgtcgttattaacgagttattttaattgagttagtatcgtcgtttattcgtcggttcgtcggaatcgcgtttattttttgtaatttcgttcggatcggtatttcgttttttcggttcggttttttttttttcgtcgggtgtaaagttaaagatttagtaaggcgacgtgaatttttgtatgtagggtatatacgtcgttttcggtttcgggagtgcgggggttcgcggcgcggagggaggttgggcgttcgggttttcgggttaaggtcgtcgcgcgtgtttatttatgtttcggcggtttcggtttcgttggtttcggcgttcgtttagatttcggttttcgtcgttcgttcgagtttttaaaggtgttgttgcggtaattttatggcgatgagtatttgttaaacggcgagtcgcgagttggtcgttttagttcggggggcgtcggggttttcgggcgcgcggaggcggcggcgagcggcgggcgtttcggtcggtttcgcgtttttcgttcgattttgtcgttttcgtcgcgttatcgatttatggagagagatattaagggggaaaatggcgttttcggagttcgaggagttttggagtaattatatttatatatatacgttcgtacgtatatatattcgtatatattggtatataggcgcgcggcgagttttgttaattttagtaggagttaaaaaaaattttatatatatatatatatatatatatatatatatattttcgttttttcgattaatgttttttttttttttgtttttttttttttttttttttttttttttgtttttttttaaaggatgggttggagcgttaaaaaatgttggtgggtttgggttcgtaggaggcggcgcgcggagggcgagggcgtttttgttgagttgtgtagttcggttcgttgagttcggcggttttgttcgttcgttcgttcgttcgcggtcgttagtgttgtcgtcgtcgtcgtcgtcgtcgtcgttgttgttttatggtcgcgttcgtttcgcgttttcgtcgcgtttcgtcgtcgttcgttcgcgttttcggtgagcgttggagtggggtcgggttcgtgtgtttgtttttcgcgtttttttcgaatttcggatttttagtgaaaggaagggggagggcgcgggcgcggaagggaggtggatcggagcggtagcgcggtttagtcgaacgggtatcgatcgttatttcgcgatttttttcgtagggggcgtcggcgtttaagttgttcgttcggagggtttagagtcgttttttagattagagtcgggggaggcgtagttagtagcgagttttgagcgatttttttttttattcgtttttttgttttagtgaatttttgttagttgaagggagcggggtttttgttcggggaaaaggaaaatagttcgtggtttgggatttgggattttttgtcgtttttagcgtttttttcgtttttcggcgtttttgcggtttagtggtttttgcgcgtcggagttcgtcgcgaagattgagcggtcgcggggatcgtcgcgggtttcgcgcgtatttttgggtttaatattgttatta

SEQ ID NO: 10594 - DNA, 233 bp, Artificial Sequence
  Description of Artificial Sequence: Synthetic polynucleotide
aaataaaaagattaaaggagtagcggtcggggcggtagcggtttttaggtcgggatattcggggtggtgcgttcgggtttgcgggggttgcgtcggcgtcggggaggcggggggagcgggagcgggcgacgcggggaaggggggagttagggggagggcgtcggtcggaggaggggcggattcgttcgttttagtcgagtagagtatagtcgagtcgagcggttcgggcgggg

SEQ ID NO: 10595 - DNA, 213 bp, Artificial Sequence
  Description of Artificial Sequence: Synthetic polynucleotide
tttttttttaaagtaaatagtatttttttattattttgtagttgggttttttttattggttttcgttttttcggtggagacggcgacgtggtttatacgcgagtttttcgtcgaggatgaattattagttagttcgagttgttatattttattttagtatagttatcgcgagagtttcggggtcgcgtcggcgtgttttacgtacgcgtagtt

SEQ ID NO: 10596 - DNA, 236 bp, Artificial Sequence
  Description of Artificial Sequence: Synthetic polynucleotide
cgcgttgagttttattttgcggcggtcggacgtttcggcgtagggggcggcgcggcgggcgcggtgttgggtatcgataacgtgtgcgagttggcggcgcggttgttttttagtatcgtggagtgggcgcgttacgcgtttttttttttcgagttgtcggtggtcgattaggtggcgttgttgcgtttgagttggagcgagtttttcgtgttgaacgcggcgtaggcggcgttgtt

SEQ ID NO: 10597 - DNA, 233 bp, Artificial Sequence
  Description of Artificial Sequence: Synthetic polynucleotide
ttagttgtggatttttaatatttgtaggttataggattagaggttgggtttttaggagtagaggatatagagtagtgaagacgagattcggagttttagcggtagttaaagataaagaagcggataaatttcgttatatttcggaagtcgtttttttcgtttaagttgcgtgtttgattggatagtttttagtttagcgtcgttgattggataacgtttaaaattttattttt

SEQ ID NO: 10598 - DNA, 737 bp, Artificial Sequence
  Description of Artificial Sequence: Synthetic polynucleotide
ttcgttcgatttaggtttcgagtttttttttcgattttttttagtttaaaggttgtattcgttttaggtttttttagttcggttttttagtttttttttcggttttttttagtttggggttcgggtttttttttcggttgagtagtcgggttcgcgattttttttatttttttcggttcgggttttcggttttttttagaggtgaggtaggggttatttagaatttcgcggttttttattttttttaagattattttcgttttagttttttgttttttattttgtttttttaatttgggttttcgattattgtttcgattttattttgtcgttagggattattagtcgtttttttcgcgtttaggggacgcgtagcggtagtttttgttgatggtaagggtttgcgtattcggaaattttagggtttggggcgtggtgcggtttttgcggttagcgggtttcgtttgagttttagggttttttcgttgttggattacgttttttataggttttagggtcgcggatgaatttcgatttttgttttttttttcggtgttgtggttattgagttaagtttggcgagtcgaggtgattcgggtcgggttgcgggaggagttcgcggtgaggtggtttcgcgttgtcgggcgaggtcggtttacgtggagtcgggagtttgaggtttttgtacgcgggagttgcggacgatggtggttagtgttattgtttacgacgttatt

SEQ ID NO: 10599 - DNA, 308 bp, Artificial Sequence
  Description of Artificial Sequence: Synthetic polynucleotide
atagaggtgtagtttagggtttaagatttggttttcgggttttaagtttaatttcgggttcgttagtttagtaggtgcggagttaagtttttttatagacgcggttttttttttacgcgaggtttttaaatttcgtaaattaacggaaatgaagttacgtttcgggagcggtgtttttgggaaatgtagtttagcgtttcggacgtcgtgtttttgggaaatgtagtttagcgtttggttagtcggttagaacgttaggaggttcgggtcgtttatttttcgaggggttcgtgggttcggtttgtgga

SEQ ID NO: 10600 - DNA, 1100 bp, Artificial Sequence
  Description of Artificial Sequence: Synthetic polynucleotide
tgatgcgtttggtgattttttttgggtttttgtttaagcggagttataggttgtgggggcggttaggtttttggggaagagtaggtgtcgcggtgtcggcgcgttagtagttcgcggttaaggttatttgtttttagggtttcggtatttttgcggggaggcggtaggtagaggacgcgcgcgtagtcgcgtaggagtttttaggcgagtgggggaagtatcgtaagagacgcggatttggagcgcggttattgcgttatcgtagcgatttgggttatttaagtcggcgggattgagaggtcgttgcgcgtgggtaggggtttagattgcgttcgcggtgtttgtttcggtttttatttcggaacgattgtagttttgcggggttcgtcgtttatatcgcgttgaggacgttgtttaagttaggcgttcgttttcgttcgcggttttagtcgttcgtagcgcgtcgtttttagacgcgcgtggttgttggcgagggttgagatcgcgttttcgtcggttagtttttagtagtagcgtattttttttgtttcgcgttttcgtttcggattcgcgtcgtcgtagtttcgcggtgatgagtttcgagtcggtttcgtcgtcgtcgtcgttttagtgttttggttgcgatcgcgcggagtcgatcgtttagcgtttagaggagggcgacgaggtttttcgcgcgggcgattacgagatggtagtcgagttttttcgttttatgttagtcgggttggcgtagtcggatcgcggtttgtgtttgaggttgggggacgcgttggttcgcgtcggtcgttttttcgaagttttgggcgcgtttcgcggcgtcgcgcggttcggggcgttgcggtcggaggagttggaagagttggcgggcggtttggtgcgcgtcgtgggtttgcgcgatcggtcgttgttcgcggagaattcgggcggcgagttcgaggcgttcggcgagggagggtcggtttcggagtttcgcgcgtttcgcgatttgttcggttgttcgcgttgtcggcggttgttgtataagtcggtgacgttgttttgcgggtttatagtttgtaagcgttgcgtggagttag

SEQ ID NO: 10601 - DNA, 214 bp, Artificial Sequence
  Description of Artificial Sequence: Synthetic polynucleotide
gaagaaataatatattgtagattgtaacgagtacggggagttagcgaaaggtagggcgtttattagggcgcgttgagagatcgggaattttcgtaagggcgttcgcgtcgttcgttattcgtcgtcgcgcgtacgtcgcgttttcgtttatttttaaataatatttatagttagggtttttttttttttttttttttttttttttgttttcgtt

SEQ ID NO: 10602 - DNA, 582 bp, Artificial Sequence
  Description of Artificial Sequence: Synthetic polynucleotide
agtttgttttttttaggaggagttgttttcgtcgttttttcgggttatggtcgacgagcgcggcgcggaggagcggtcgggggcgcgttggggagggggcgtcgggggcgcggcgcgggcgtagaggcggcggggatgtcgggcggttcgggttgcggcgtagtttttttttttgtagttttttttttcgttttcgtcgtcgtcgtcgcggtcgcggtttttttttggtttttatttttgttgttttcgggtatagattttttgtcgtcgtcgcgcgtcggtttttttgtcgtcgtttgttagttttattttttgttatttttttgtttttttttcgttttttttttgtcgttcgtcgcgtttttttttatttcgcgttttttttttttttttttttttttttttttttcgcgggtttttcgtttttttcgtgcgtttcggtcgtttttcgtttttagcgcgtcgttttcggggatgtttcgttttttttttaagagcgtcgggttacggtcgtcgtgttttttggagtttcggcgagggcgggtacgggttttcggtaggtgcggggcgtacgcgggagag

SEQ ID NO: 10603 - DNA, 203 bp, Artificial Sequence
  Description of Artificial Sequence: Synthetic polynucleotide
tttttaggaggcgttttgatttcgtatttcggttttttatttttcgatcgttagttttagggtcgtcgcggcgacgcgcgattttttttttttgaggggcgcgggtttcggacgcgtcgggttttgttaggtatttagtggagggtcggaggtcggcgattagttcgagtttagtcgtttcgggagttggcgcgagtgtcgtt

SEQ ID NO: 10604 - DNA, 823 bp, Artificial Sequence
  Description of Artificial Sequence: Synthetic polynucleotide
taattatttgttttagatcgcgttatttgtaatttgtttcgggttggcgttatattcggcgtttcggcgttttttataagtgttttcgtttatgattagcgtttgtaggggtagttcggagttcgggtggggatagtagcgtagtttttggtcgtagcgcggggtgtagacgtcgtacgtttcgttttttagtcgggcgtatatcgagtagtagtcgtagttcggttttcggacgagtttcgcgtatggtatgcgggcgttttcggttattgcggttatcgcggcgggcggcgtaatcggcgggggttcgtaggcggttaggcgttcgggtgtgtagggcgggtagcggaatagtattttcgcgcgcgtttcgtcgtcgtcgttattcgcgtttagtagtagtagtagtagcggtagtagcggcggcggcggtagcggtagcgcggggtagtttattttcggtagtatgttggcggtcggtagcgcggcgtggcgggcgagcgagcgagcgggcgggcgggtaggtggtacggttttgcgagcgcgggagtcgtttttttcgttttttttttttttttcgtcgtcgtagtcgggttttaaagggtcggttttttttcgttttttgttttttttttttttttttttggagattatttttttttttttcgatattttttcgcgtcggtaagtgagtgcgcgtacgttcgttcgtttattttcgcgttggttgcgggttttgggggttttttgtttttttcgggtttcgttttttcgtatttttttggtttgattatgatttttgaaggagaatacggataattcg

SEQ ID NO: 10605 - DNA, 293 bp, Artificial Sequence
  Description of Artificial Sequence: Synthetic polynucleotide
ttttgtttttaagggagagggatagtattttttcgggtttttagtttttttgggtgtggcgggagagttttgggcgaggttgcgtttatatttgtatttcggtcggttttttcggttgatttcgttttggttgatttcgcgtatattttttttttagcgttgtaaggatcgtttgaattcgttggttatttcggtgatgaattagtggttcggtgtgaagttgcgggtgatcgagggttgggacgaggacggttattatttagaggagtttttgtattatgagggtcgcgcgg

SEQ ID NO: 10606 - DNA, 262 bp, Artificial Sequence
  Description of Artificial Sequence: Synthetic polynucleotide
gcggggtatgttggcgcggttcgagggtacggtattggttcggtttttttttcgcgttcggtttcggcggtttttagtgttttcggtttattgttcgggcgcggcggttgcgggattcgcgtggcgtcggcgacggttcggtttagttttgcgttttgtacgcgcgtttttgttttcgggttcggtagtcgtttttttttaacggggggagggggttattgttttcgtttttcgttttttttggagttaattagcgcgttcg

SEQ ID NO: 10607 - DNA, 240 bp, Artificial Sequence
  Description of Artificial Sequence: Synthetic polynucleotide
gttttttttttattgttttttcgttattagtcgtttttgtcgtcgagttcgtagtcgttagcgcgtttcgagtttttttaggttagaggttttcgtaggcgatggcggataagagggcggggattttagaagtcgcggcgcgttcgtcgttcggttttgttcgggagggggacgcgcgtacggttttcgcggttcgggttcgagaagttggggggcgcgggtttttttatttcgtagcgg

SEQ ID NO: 10608 - DNA, 1240 bp, Artificial Sequence
  Description of Artificial Sequence: Synthetic polynucleotide
ggcgtttttgcgtatagtggttatttggggtcgtattttatgtttgtttgagttttttcgcggcgggttgacgtcgggatttgtttaatcgttataaaacgtttaaataaaaatagggtcggttttttagtagtggagagttattcggagtatcgtttcgggtcggtttcggtttcgaggtttcgggggtttaggatttcgtgcgtgtggcggggaagaggaatttagagtttttgggttgttgtttttttcgtcgtttttattgtgaatattgtgcggtggggtgaacgcggggagcggcggggttagtggagtcgaattttagggttttgcgattgtattcgttaggaggggttttcgtttggtttgagaaaggttttttgaggttaagagttgggtttgaatataattttcggagtttcgagttcgttttttttaatatataaatacgcgtagatttttagaaataggaacgtacgatatatacggttagaagtcgcgaggatatatagagcgtcgtttattgggcgggggtcgtttgggaataaagggtttaggaggcgttgtttcggcgtttattttgagtttttttgggggtgatacgggatgggggtggggtgtaaagggaattgagggaggagagtgcgcgaggaggggaaagcggtgatttggtttagaggtggggcgcgtattttaggcgagcgtgcgtgggtcgggatttgtagggtacgggggtgggtttaggttggtcgttttatttcgttttagcgtttcgttaggttttcgtcgtttcggggtcgttcgggtcgttagttagttgacgcggggggcgggggagttgttaggcgcgtttcgttttgcgtcgttgggtcgcggaggtcgtgtagttattggttcgcgtatcgggtcgttcgggttttcgtattttagtgatattaggaggcgataaaaggttgcggcgtcgtcggatttagtatagttgtatcgtcgagttgcgagcggttgcgagcgagagagcgtaagagtaagagagttagagagcgagtaacgggtattcgttttacgtttttttttagttttatcgcgcgtttcgtttgtttttttatttcgttcgattttattcggttcggtttttgcgcgggtatagtttagagttttggggcggtgtaggtagtttcgggatttttcggcgcgtcgtcgcgtttttagataaaggtttggtcggcggtttcggttcgtt

SEQ ID NO: 10609 - DNA, 222 bp, Artificial Sequence
  Description of Artificial Sequence: Synthetic polynucleotide
aataaaaatttatattatatagcgatggtggtgtttggtggcggtggcggggtggggggtttgattagatgagtcgtttttcgcgttttcggcgtcgggcgttatggttcgagtcgaaggcgtttttggtttcggagcgttcgcggtttttgcgtttggcgcggtcgtttaagtaggagaagaaggcgtagtttaggaatattcggaagtagtaggtcgttt

SEQ ID NO: 10610 - DNA, 714 bp, Artificial Sequence
  Description of Artificial Sequence: Synthetic polynucleotide
tgtgattttttttttttgttttaagtggttggcgatatagttttcggcgcgtcgggtattgaggttttggagtatagcgtggggggtttggtatagatacgatttacgatcgggtcgattttcggttagaaagaattatgtttcggtcgttcgggtcgcgggttcgcggtgtatttttgtaggtttttattttgtttcggtagaggtttgtaagaattttgtgggtgtttttcggagcgggtagaggaggagtttagcgtcgaggtttaggcgcgtttcgttttcgttttttttcgtgtttttttttcgttgttttttttttaaaggtcgagatttggacgttgttcggtggtttcggcgggggttttgtttttggtcgttgtttttttgaattttaggtgagaagaataaaacgttttgacgttgttcggttttcggtttttggagaggacgggtcgtttttgtcgagagaattgtgcggaattaggaagcgttggtgttttttcgtttttacgggattaagcgaaattcggttttaaacgaagtaaagtcggttgttttttggagtatttttgttatagtatttttattttgggttagggtattttgttgcggattttgagttttaggaaggaggtttataatagcggaaagttatttttttttaagaattgttgagtttttcggattgtatttttaaagattttttttgaa

SEQ ID NO: 10611 - DNA, 1216 bp, Artificial Sequence
  Description of Artificial Sequence: Synthetic polynucleotide
tttattttgaggttttttagatttcgtagggttttttacgttattaagtttgtttcgattttttttcgttgttttttatattttttgtcgcggcgcggtcggttagggatttatttcgaggtttagttggtgggggtgttggggtgcgcgcggattcggtatttacggcggcggcggcggtagtagtagtaggaggaggagaaagacgaggaggaggaggaggattagttgagcggcgttttttttttagttcgtagcgcgtattggttttttggggtattttcgggagagtattaagatcggagattaggcggcgatataggtaatcgttgttgtacggggttgggtttagtcggtttttagaggttagggtagggggaggtaggattgggaaggagggtcggagaagtggggtgtagagggcggggtagcgagcggttaggttcggaggaaggcgttttaggcgtttagggatgtcgtcgttcgggttgacgtcgtcggttttttttttcgttaggcgggcgtttgtagtcgcgggcgtacgggtttcgtttcgtttatcggttcgttgtcggcgttcgcggtgcgtttcgttttgtgtttttcgtagtcggcgtgtatttggtgtaagtaaaggcggttagttgatgggtcgcgcgcggattggttgtttcgtcgtttttttttttttcgttcgatttttttcgcggtttttcgttttcgttttcggcgcggtttcgtgttgggtattatttgtggatcgtttaataaaggcgtagcgcggcggggttcgggtggtcgggtcgcggtcgtcgttttttgtttaggggacggtaggttgcggttgggtagggaggcgaagcgtattgtcggtttttagtaaaagatagattaaaagaaaatatacgttcgtgttaggaggttagttaggtataatggggttttatttttttgcggcgtagaattcgggttcgggggttgagaattagatatagttcggtttggggttgtgggagttaagtttcggggtgaaattcgattttgcgttttaaaatatagggcgcgttttcgggttgtgtgtgcgcgttcgggggcgtttttcgtagatttggttcgggtcggtgtttttgtcgcgggaaggaggattcggacgtttaatttagcggcgaagtcgttttttattggaggaggtttttcgaaaacgtttttgaaattt

SEQ ID NO: 10612 - DNA, 207 bp, Artificial Sequence
  Description of Artificial Sequence: Synthetic polynucleotide
ggtttgtttagtttttatttcggtatcgaagtcgtagttttcgggtttattttcgtatttttaggggttttcgggggttgtcgataggtttttgattagcgagcgcgttttcggggtaagtatttttggcgggtagaaatttgggagcggagtatagcggtgtaagggaatcgtgttaggcgggaagggcggaatttgcggggaatt

SEQ ID NO: 10613 - DNA, 253 bp, Artificial Sequence
  Description of Artificial Sequence: Synthetic polynucleotide
ggttgcgtagcgtttttaatttaatttttggatttattttcgttttagtttttttcgtgtttagcgttttttgtaaatgattttttcggtcgggtgtttcgttttttttttcggtttttttcgcgtggtttgtttttcgttcgtttgcgttcgttcggtttttttgtttttgcgtttttatttgatcgtaaaggcggttagggtagttttcgcgcggtttgatagttacggtttttagtttgtttttggacgt

SEQ ID NO: 10614 - DNA, 209 bp, Artificial Sequence
  Description of Artificial Sequence: Synthetic polynucleotide
ggttaggtttgagttttatttatttacgtcgtattttttttttttcgtgggggtttatatggtcgtgtcgggcgcggtttcgcgggcgcggcgatcgggcgataacgcggcggggacggtcgcgggttcggttgtggcgtatcgcgagtcgaggcggggacggttaggcggcgcggggtagtgggcggcgtattttttataggtcgttc

SEQ ID NO: 10615 - DNA, 225 bp, Artificial Sequence
  Description of Artificial Sequence: Synthetic polynucleotide
ttgcgatcggtttttaatttgggtcgagttgcgtagcggggcgggcgcgcggggcggggcgggtcgcgggttttggggagttggtcgggaatcggagttcgcggtcgtttggtcgaatttgttcgcgcggcgtcggggaggagttcggggcggcggcgcggggcgcgcgttcggcgagggcgttttttttagggtcgtttgtagtttgcgggacggggtcgagcg

SEQ ID NO: 10616 - DNA, 1133 bp, Artificial Sequence
  Description of Artificial Sequence: Synthetic polynucleotide
ggaggagaagcgacgtaagtgggtagttttttagcgtcggcgaggcgcgggaggaggagaagtagtggggaggcgtagtcgtttatttgcggggtagggcgcggaggagggattcgggttgcgcgttttcgggtcgaggaattaggacgcgttcggagtttcgtacgcggttaagttcggggcgtttttttttttcggtcgggcgaatttaaggggcgtagttttttgttttgatagagttggtcggcggaggcgtgtagagcggcgagtcggcgagttaggttgagaaattcgagtcgggaataaagaggggtcggattgagtgtgtgtgtcggttcgagtttcgggtagaggtatttgggttcgaggttttcgttgtgatttttcgagatttcgtagtgttttttattgcggagttttcgcgtttgtcggtaaaaattttatttttggtaaatttttttttttttttttttttttttcggtttttattttttgttttttttttttttttagtagattaaatgagtttcgagaagaaaaatcgaagcgaaagggaagaaaataagaagatttaaaacggatatttttagcgtgggtggttttttttttttttttttttttttttattttttaggaagtggacgtttcgttattttttgatttttgtatttttttttggggtaaacggggtttttttgtttagatttttttttttttttcggaaaataaattattaagtcggtattcggggtaattatagtggagagggttttcgcggagacgcgtcgtcggatttttttttgtattttggggaggcgtgttttttttagaatcggcgtttttcgcgcgtaaatttcggcgacgcggggtcgcggggtggtcgtcggggtagtttcgtttagcgcgcgtcgcgtagacgttttcggagtcgttagttatcgtagttttcgtcgtttagtgtttttcggtttcgggggcgggcgtttgcgtcggttttcgcgaagcgggaaagcgcggcggtcgtcgggattcgggcgtcgcggtagttgtttcggttgtcggtcggcggtttcgcgttcgttcgtttcgttttcgttcgttgttttgttgtacgaatttttttaatttttttt

SEQ ID NO: 10617 - DNA, 478 bp, Artificial Sequence
  Description of Artificial Sequence: Synthetic polynucleotide
tgaattgagggggttcggcggtcgttgaggaggggagcgcgcgggaggaggggcgaggagttcggaggcgggcgcggttggtagtttagagggttcgggcggaggtttgagagtagggttggaggggcggaggatcggggagattcgttcgcggcgttttcggtcggttttgagtaggcgtcgtggtagcgttcgcgttttttgttcgtttttcgtcgtcgttaggacgtaggttcgcgttagggttggcggtagggttcgtagttgtcggtttggcgtttttatttcgcgtagtcggtttcgtttagttttttcgcgtttgattggtcggattttgtttttggcggaggtaattgttcgcggattttttatttcgcgattttggttttttcgtaagtttttcggattcgggcgttttcggtttttttttatttatttttttgtcgggtaggttcgcgatttttcgtttttcgggtcg

SEQ ID NO: 10618 - DNA, 201 bp, Artificial Sequence
  Description of Artificial Sequence: Synthetic polynucleotide
ttaatgtgttttaatacgttttaatgtgttgtgataggaaaagagtcggttaacggtattacggaagtattagttggtatagaggttcggtgtaattatcgttttgtatcgtaaaacgggtttaggaagtttttaggagatattagcggtgttagaatcgagaaagtgacgatatagataatttatggatttcgcgtacgg

SEQ ID NO: 10619 - DNA, 208 bp, Artificial Sequence
  Description of Artificial Sequence: Synthetic polynucleotide
gttttcgtcgtcgttcgggtcgcgttcgtttcgtttttaggcgtcggtttcggagttcggttcgcgagtagcggcggttgtcggagggacgatgagttgcgcggggcgggcgggttttgttcggttcgtcgcgttcgttttgttgatttgtagtttgtggtcggtacgggtagataacgcgagttaggagtattatacggcgtttatt

SEQ ID NO: 10620 - DNA, 210 bp, Artificial Sequence
  Description of Artificial Sequence: Synthetic polynucleotide
ttagtttttcgggaagtagtaggcgtacggtcgtttggatttttttggaggtgatggtcgagcgtttgttgtaatgcgttaggcgggaagtttcgtcggcgatgcgttcgaagatgtcgttgataaaggaatttatgatttttatggttttagaggagatgtcggtgtcggggtggatttgttttagtattttgtatacgtatacggagt

SEQ ID NO: 10621 - DNA, 229 bp, Artificial Sequence
  Description of Artificial Sequence: Synthetic polynucleotide
ttttaagatagggtttttttttcgttcgggttggagtgcggtggtacgattttcggtcgttgtaacgttcgtttttgggtttaagtgatttttttgtttcggttttttgagtagttgagattataagcgttagttattatagttcggttaatttttgtattttttagtagagatagggttttattatattggttattttggttttaaatttttgagtttaggtgagtta

SEQ ID NO: 10622 - DNA, 209 bp, Artificial Sequence
  Description of Artificial Sequence: Synthetic polynucleotide
tttttttttttttttaatatttttttttagaaaaagaggaacgtaacgaagggagtttagttattatgttggagttgtggatcggttttgtgaggtttacgcgggagcgcggaggtttttgggttttagggcgtcggtagatggtttgtagcgtatcgttcggttttcgcgttggttacgttcgttagcgttatttttttttttcgttt

SEQ ID NO: 10623 - DNA, 255 bp, Artificial Sequence
  Description of Artificial Sequence: Synthetic polynucleotide
gttatttcgtagcgagttaaagttattttttattttgggttcgttacgcgatttttgtcggttttcgttttacgcggttttagtacggcgttaaggtttcgtttataaatcggtttcgttttttcgtgttcgggttcgtcgtttattagacgtcgtttcggcgtagcgagttgagggtacgtttatttttttttcgggtttttagtttttaaggttttagtataatgttttaggaggaagattttaggttttttt

SEQ ID NO: 10624 - DNA, 297 bp, Artificial Sequence
  Description of Artificial Sequence: Synthetic polynucleotide
tttattattgttaacgtcgtcgtcgcgttttttttattttatttttttttttttaggagaatttttagtttcggtttttttcgtttcggcgtttcgttacgtgatttcgggtcgttttttatacgtgatcgtttttttttttttttttattttcgtattcgttttttttttagttttttgtttcgttttgttggtcgttaggtatttcggggagaggtcgtttggaggcggggttttaggttttatttttcggagggtggagaggggcgggtaaattacgtcgagtgggcggggttt

SEQ ID NO: 10625 - DNA, 232 bp, Artificial Sequence
  Description of Artificial Sequence: Synthetic polynucleotide
tagtcgttttaagtttttttttttttttttttttttttttttgtttcggaaagttagcgagttttcggtagcggtcgtattttcgtttcggtggtttgacgacggcggcggtcgtttttgcgcgttttttcgttttttttcggtttagtttagacgtcgtagtggcggtaattgcggtagcggtggcggttttgatttcgcgtatttcgttttttttttttagttagtttat

SEQ ID NO: 10626 - DNA, 247 bp, Artificial Sequence
  Description of Artificial Sequence: Synthetic polynucleotide
tttttcgcggttttttttttttcgcgtttttttttttatatcgggttttcggggtagtagcggggaggggagatcggcgggggagggaggatagggaggcgaaggaattggggtggggggtgcgtgtgtggtggagggggtgggacgatataggtgttttgaggggaggagtcgggaggaaggcgaggaggtcgggttaagtgggggtgcggaggtcggggagataggaacgcggttgcgggcgcgg

SEQ ID NO: 10627 - DNA, 292 bp, Artificial Sequence
  Description of Artificial Sequence: Synthetic polynucleotide
gggcgttgaggttgaagttggggtcgggggtgggattgggggcgttggggttgggtcgggggtgggattgaggttgcgggcgtttaattgggattgagtcgagggtagcggtggggttgggtcgggggagtaggggtcgcgtcgggtagcgtcgcgtgttggagcggaggcgggtgcggtcggggtaggtcgcgggaggaggaagcgtttggggagtaggagttgggtcgggcgggttcgcgtttcgtattcgcgggggtgaatcggagtcgtcgtagggggttcggggggt

SEQ ID NO: 10628 - DNA, 201 bp, Artificial Sequence
  Description of Artificial Sequence: Synthetic polynucleotide
tgttgtggggtttagggttgtatggggtagtaaggcgcgggggttcgggtcgtagagttttcggggaggattcggaggggaggtagtggttcggcggttcgggttatagttcggtgtggtgggggggagggagacggggcgggagagggggtaaggttgtttttgaagggaattagttggttcgttcgttggtcgagttgt

SEQ ID NO: 10629 - DNA, 201 bp, Artificial Sequence
  Description of Artificial Sequence: Synthetic polynucleotide
atttttgttttttatatttattttttattttcgttttagaaatacgttttttatatcgggttcgtcggatttttatattttttattcgcgttagaaacgcgcgtattttcgtggtttttttttgtcgcgcgtaaatacgttcggttcgcgtacgttttttcggtttggtttcgtatattcgcgttagaaatacgcgtggtc

SEQ ID NO: 10630 - DNA, 201 bp, Artificial Sequence
  Description of Artificial Sequence: Synthetic polynucleotide
cgacgttcgagttagcggagttcggagtcgttgggtttttcgtttttttcgttcgttcgtttttttcgttttttcggtttttttcgtttcgtcgttttgcgtcgttttattataaaaggtgaggttcggggggagggggcgcgggattttcgtttcgcggaagcggtttttatttgttttttaatttgttcggtcgcgttt

SEQ ID NO: 10631 - DNA, 201 bp, Artificial Sequence
  Description of Artificial Sequence: Synthetic polynucleotide
gttttattaagcggttttagttataacggcgtgtatgttaattacgtttgtaggttatcgttcgttttcggttgtcggattatttagcgcgttttttttcgagtttcggacggggagaggaggagttaggggaggaggcgggaggaagggaaggatggggaggataatgggggaagaagagggaggatggaggaagggggt

SEQ ID NO: 10632 - DNA, 201 bp, Artificial Sequence
  Description of Artificial Sequence: Synthetic polynucleotide
tattatttcgttgtcggcggcgtttttttgggaagtagtagtaattggtggagttggagtcgtagtagtttgagtcgtcgtagtagtttttgtcggagtcgtagtaggaggaggaggaggcgggcgtcggggtgggcgtcggggcgggatacggagcggggttttgggacgattttttggaaaagtttttggcggaaacgg

SEQ ID NO: 10633 - DNA, 201 bp, Artificial Sequence
  Description of Artificial Sequence: Synthetic polynucleotide
gggcggggtcggaggaaaaggggcggggcggcggggaaaatataaattaaaatttaaaaattagttaaaggaaggatggaagtttcgcggttttttcggcgtttagcggtgtttttgttttggtgttcggattttagttcgcggtttgtttgtttgttagtttcgtggatatcgtattgtcgggtagcgtttcggtcgtat

SEQ ID NO: 10634 - DNA, 201 bp, Artificial Sequence
  Description of Artificial Sequence: Synthetic polynucleotide
tagtatgatgtcgtttttttggtagtggtagggggtcgggtaggcggtgggtttcgggtcgggttggggggcgtcgtcggtttttcgggaagcgtatagcgcggcgtaaagttatagcgttcggagtttcggcgggttgggtatttcggcggtcgggttattggggtatttggcggtcgggcgcggacgtacggcgcgatg

SEQ ID NO: 10635 - DNA, 241 bp, Artificial Sequence
  Description of Artificial Sequence: Synthetic polynucleotide
cgaagaaaggggcgcgggggcgcgggggcgcgggggcgcgtggggcgttgggcgtcggaggtttggtaggatgcgcggtggggtcgtcgtcgtcgtcgtcgttgcgcgttcgttttttggtcgggcgcgcgtttcgtttcgtagtatttatagggcgtcgcggtttcgtttttttataggtttcgtttcggttagtttacgtttcgttttcggtttcgttttttgtcgttagggcgcgtag

SEQ ID NO: 10636 - DNA, 201 bp, Artificial Sequence
  Description of Artificial Sequence: Synthetic polynucleotide
gtcgttgtcgttttgtcgttcggtgtgcgagcgcgttaaggtcggttgcgcgtcgtttatgcgttagtacggtttcgtttggttcgatcgtatgcgttgcgatcggttgttcgagtaaggtaattttgatacgttgtgtatggattataatcgtatcgatttaattatcgtcgcgtttagttcgtcgcgtcgtttgtcgtc

SEQ ID NO: 10637 - DNA, 201 bp, Artificial Sequence
  Description of Artificial Sequence: Synthetic polynucleotide
agaggaagtgagaggtgtttaattcggttatgtagaacgtagttgggttgttcgaaacgaaataaagcggttatttcgaaggaggtgttgtttttgggtcggtttaggttgagttagagtagacgttatttttacgttaaaaatattaggttattgttttagggagttgggttatttattgaggttatttttattttattt

SEQ ID NO: 10638 - DNA, 201 bp, Artificial Sequence
  Description of Artificial Sequence: Synthetic polynucleotide
gtatttatttttttgacggtttcgtttcgtagggagggtttgtgtcggttgttggagtttattcgtagatttatttttattattttcgagggttagaggcgcgatttcgcgtattcggcgtttcgtttgttgcgttagtatcgttatttggtgattttgttgttttggaggttcggtttcgtggtgcggagtaggcgcggg

SEQ ID NO: 10639 - DNA, 201 bp, Artificial Sequence
  Description of Artificial Sequence: Synthetic polynucleotide
ggtttttggagttattggtttagggcgggttcgcgggatggggcgggcggttcggggcgtagtcggttaggtcgttgttatggtaacgcggtggaaaaacgggtttttgggtatttcgttgtcggtcggttggtaattttttagcggagggatcgggtcgagttcgcggattttttcgagtgttttttggggtttagtcgt

SEQ ID NO: 10640 - DNA, 201 bp, Artificial Sequence
  Description of Artificial Sequence: Synthetic polynucleotide
ttaaaagtagtttttttgaattttatttgggttttgtagggttttttcgaggttcgagaattgggagaagggaaagagtttatcggtttgtttgaaggtcggcgggcggtgtaggtagttttttttagatttttttagtttcggttttttacgtatattagaagagtcgttttttttttttagtgattgaaattatttgga

SEQ ID NO: 10641 - DNA, 201 bp, Artificial Sequence
  Description of Artificial Sequence: Synthetic polynucleotide
ggttttgttttagggttttgtattttcgagagttgttgtatgtcggggattggtttttaagtttgtttgagtttttttagtttttcgggtatcgttatgcggtgggagggtgagttttttttttttgttgaaatttcggcggtttggtaatcggtcggggggttttggatttttcggggagatattattgatgttttgtgg

SEQ ID NO: 10642 - DNA, 201 bp, Artificial Sequence
  Description of Artificial Sequence: Synthetic polynucleotide
gtgtttttcgttgatttttagaggagatattggttagggttttttttttcgagataaattttattttggaaaggttgttagatcgggcgcggtgatttacgtttgtaattttagtattttgggaggatgaggtgggcggattgtttgagtttaggagttcgaaattattttgggtaatatgttgaaatttcgtttttatta

SEQ ID NO: 10643 - DNA, 201 bp, Artificial Sequence
  Description of Artificial Sequence: Synthetic polynucleotide
gtatatttcggtcgggtgcgggtcggcggggtatagcggtttttacggttcgttttcgttagttatttttcggttttttttttcgttgttcgcgtgtttcgggtcggtttagtatttttcgagttacgtgttcgcgtttttcggcggggaggagcgtagtcgcgggggcgcgtttcggtgatttcgttttttagttttttt

SEQ ID NO: 10644 - DNA, 201 bp, Artificial Sequence
  Description of Artificial Sequence: Synthetic polynucleotide
ttttcgcgtatcgtcgtcgcgtatttatttttacgggtggagcggggcggggtagtacggtttcgcgcgtagtttcgattcgttaggcgtatcgatcggcggcgtagcgttggcgcgacggttcgattcggtcgggtttttgtttcgggcgcgggttcggtttgggagcgggcgagttcgtttgtaggggaggcggggatt

SEQ ID NO: 10645 - DNA, 201 bp, Artificial Sequence
  Description of Artificial Sequence: Synthetic polynucleotide
ggggcggagcggggaggggcggggcggagcggggaggggcggggcggagaaggatcgtagggttgagcggggcgttagcgttagtgttcggtattgtttcgggttgggttttttgcgttagaggaaggggagttcggggacggggtacggggttcgcgaggtacgggtgttttttcggggtttcggaagttttttttttcg

SEQ ID NO: 10646 - DNA, 239 bp, Artificial Sequence
  Description of Artificial Sequence: Synthetic polynucleotide
gagaggaagggggaaggagatagaggaatcgagattggggtgagggagcggtcgcgcgtggttttcggagaggcgtttattatttgcgtggcgttttttcgcgtcggagtgcggttttgtttttagcgttagtgcgtcgcgcggttcgtcggtttcgtaggattggttatcgttttttatttatgtaatttgcgtgtgcgtgtgcgtgtgtgtgtgtgtttttttttcgttcgtttttt

SEQ ID NO: 10647 - DNA, 201 bp, Artificial Sequence
  Description of Artificial Sequence: Synthetic polynucleotide
ttttttcgtgggtggttttcgtgagttttttggttagtttttttattttagttttataatggtttatcgtttgtaatattttttttgcggttatagtttcggtggatggaggtaggagggggttacggggtgggggagatggatgcgaagttggcggggaaagggagaaggaaatgggaagggatgggtggaaacggaaaa

SEQ ID NO: 10648 - DNA, 201 bp, Artificial Sequence
  Description of Artificial Sequence: Synthetic polynucleotide
ttatttgaaattgataggtttgttttttatgataatagttgttattaattagttttttttatatttttttatttatcggttttagtattttgtatatttcgcggagaattcgtttttggttttttatagagtatagtattagggtgtagattattatatttatagagttattagttatttggtgtatgtttttttcggtag

SEQ ID NO: 10649 - DNA, 201 bp, Artificial Sequence
  Description of Artificial Sequence: Synthetic polynucleotide
aaaatagtagttttatggaaaataatagaaaaaaattttattttagtttggtaattaacggttggtcgggggacgtgttcgcgttgtttttttttcggtcgttagggggcgtaggaagaagttttggaggtttgtttcgggatcgcgtattcgtttttttttttcgttagttttttttttattttcgttgagtttcgtttc

SEQ ID NO: 10650 - DNA, 201 bp, Artificial Sequence
  Description of Artificial Sequence: Synthetic polynucleotide
gtttgacgaagttttttttgggggtcgatgttttttttcgggtgggaaggggcgttgtcggtgagggttattttggcgtcggtttgcgtcgttcgaagtcgggggggaggggaggttttcgtttagtaggggttacgttcgtttcggacgggggtcgcgcgggcgtttaggcgacgtattttcgtcggggttcgtgatcgt

SEQ ID NO: 10651 - DNA, 201 bp, Artificial Sequence
  Description of Artificial Sequence: Synthetic polynucleotide
ttttgagaagtaatagatttcgattaatgtgtatcgttttcgcggcgtttcgtcgcgttcggaatcgttgtttatttggcgttcggtaaggaaggttgtcggagggtttataggtgtttttttcgttttcggagaagttcggtgtgggcggcgttattttagaaacgttatcggcgcgtttgtttcgagcggcgggggcga

SEQ ID NO: 10652 - DNA, 201 bp, Artificial Sequence
  Description of Artificial Sequence: Synthetic polynucleotide
tttgttatttgtatttaagatggatttttcgttgtcgtcgttgttttttcggtttttttgttattattttttacgttttgtagttttgttttttgtttacgggttgttaagtcgcggtttggtcggtggtggtagtggcggagttagataaagttttcgtttttttcgttttagagttttttaggcgttttaagtggcggg

SEQ ID NO: 10653 - DNA, 201 bp, Artificial Sequence
  Description of Artificial Sequence: Synthetic polynucleotide
ttttagggcggtcgtttttattttcggtttttatttagcggggatttattagggcgagggttgaagatttcgcgggacgtcgcgcgtcggggatagcgacgtatttatttttttagttatttgggaggttgtaggttcgggtcggagttcgaggtttaggggcgcgcggagtagttttggttaaggcgtagggcgcggggt

SEQ ID NO: 10654 - DNA, 201 bp, Artificial Sequence
  Description of Artificial Sequence: Synthetic polynucleotide
ttttggggtcgggcggggcggggcggggtaggggggtcgggcgcggtttacgcgttttttcgagtgcgcggtgcgggacgggcgcggttgacgcgttttcgtcggtgtttgtgttttttcgtaggttaggagggtattttgcgttgttattcggatttggcgggtagcgagttgtagcggggtacgtttacggtcgagtcg

SEQ ID NO: 10655 - DNA, 201 bp, Artificial Sequence
  Description of Artificial Sequence: Synthetic polynucleotide
cgggtttggataggttagtttgagagtatgcgaagtcggttttcgggtagataataagagatatcgtcgggaagtgttaggaatttcgcgcgttgttcgcggggtttttttgtagtcggggttgggttagaaggatggtaaagttgcgcggcgtcgttcgggttggagtcgtagtcgaggagtcgaagtttttttaggtcg

SEQ ID NO: 10656 - DNA, 201 bp, Artificial Sequence
  Description of Artificial Sequence: Synthetic polynucleotide
gattcggagttacgcggggcgggggtcggtatcgagggtcgggaggcgcgaagggtacgcggcggcgggaagcggggcgattcgaaggtttacgggggtcgggaggttgcggggcgttcgggattttttttcgggtggttatcgtgcggtcggggcgcggaagttagaggtgtttagaggcgtcgatttcgtcgaggttgc

SEQ ID NO: 10657 - DNA, 201 bp, Artificial Sequence
  Description of Artificial Sequence: Synthetic polynucleotide
tagtcgaggtagaaattcgtttcgaggcgcgggcgtcgggttcgggttttaaggatgcgcgtcgggttttttttcgcggggatagtcgagtttcgtcggcgttttaggtgttttcgtagtgcgttcgggcgcggacgtttttttgttttcggaggggaagcgggagggtttttggggtaacgtttcgatttcgggtttttt

SEQ ID NO: 10658 - DNA, 201 bp, Artificial Sequence
  Description of Artificial Sequence: Synthetic polynucleotide
tataggtgttttcgtcgtaggtttcgtatatttatttatggtatttatataggggttcgaagaatatgttcggtttagttacgtggtagatgtagacgtcgtagtcgtagcggtttcggtcgtggtatagcgcggttttcgggggttgtttaggtgcgcggtagcgtcgtttcgattcggttcgggatagtttgtaggcgg

SEQ ID NO: 10659 - DNA, 201 bp, Artificial Sequence
  Description of Artificial Sequence: Synthetic polynucleotide
agatcgttgtttggttattttacgtttttgagttttttatatagttagtttcgtgattttcgagtttcgtgattttcgagtttcgtgatttttaagtttcggaagtcgttgtaggtagcggtttagttaggtttcgttttttttatcggagttttacgcgttaattttagttaggtttcgttttcggtcgttttaggcgtg

SEQ ID NO: 10660 - DNA, 201 bp, Artificial Sequence
  Description of Artificial Sequence: Synthetic polynucleotide
gtagtagtttatcgaggacggggattcgtaagtggcggaggttcggggttgggggtcgtcgggagggcgggacgcgcgcggtttgggggtgggaggcgtcgggtttggagttcgagtcgggggattagcgatgtagtcgggcgggcgtcgcggtatttcggggtttttgtatcgtttcgaacgttgtagggttgtagggtc

SEQ ID NO: 10661 - DNA, 201 bp, Artificial Sequence
  Description of Artificial Sequence: Synthetic polynucleotide
attttgtaggtcgtatttttaattcgtattttatttaggttttcgtttggcgtcgatttgttttagtttaattttcggtttcgtagattaggtatttttcgggacgcggggtagattttgcgttcgggttttttttcgtagtcgggttgttcggtttttgcgcgcgtataataggcggtacggcgtagttttcgggagcgc

SEQ ID NO: 10662 - DNA, 201 bp, Artificial Sequence
  Description of Artificial Sequence: Synthetic polynucleotide
aggatggcgatggtattggcgcggattttttttatggtgggtagacgggcgttttaggtgggggattgggtcggcgtgttttcggggtcggggcgggggcgttcgtagttttagttgtttgttttcgttcgcgtttagttgtttagttttgtagagtagaaaaaggagagaggtgggggggcgggggggtgatagggagag

SEQ ID NO: 10663 - DNA, 201 bp, Artificial Sequence
  Description of Artificial Sequence: Synthetic polynucleotide
ttagttttttttgagggagtttagcggtgcgggttcgtttttttttagtttagtttttttgatatcgttttttttttggggacgttgtttgcgggttcgcgcgttttcgttttcgatttttttgtaggttttttcgggggtcggggtaggatcgtatttatcgaggattcgggcgttggagttagtagtagcggtacgagt

SEQ ID NO: 10664 - DNA, 201 bp, Artificial Sequence
  Description of Artificial Sequence: Synthetic polynucleotide
taagtcgaagtttttgaaggaggttcggtgttatttcggtgtgatcgcgtttcggcgacgttgggtagggtgtagggagttagttcggtcgcggtttagcgggaggggagggggtcggtttcgaattcgggcgttcgggtcgcgggtgatttattgggaacgttaggttcgcgcgtttagatcggcgggcgacgtttagcg

SEQ ID NO: 10665 - DNA, 201 bp, Artificial Sequence
  Description of Artificial Sequence: Synthetic polynucleotide
gggggttcggtttagggcgggaaatgggtggggaggggcggggtttgggttggagattggacggaggagtcgggcggagatgtaattggaggaagagggcgggacggggcggagaaggtttttcgtatcggcggagggagagggattaggagggggttgcggcgggggaggagagggggttttcggtttagagattgaggc

SEQ ID NO: 10666 - DNA, 201 bp, Artificial Sequence
  Description of Artificial Sequence: Synthetic polynucleotide
gcgatttttgttttttttttgggtcgagcggtaggcgcgttcgtatcgttttcgttttttcgtcgtagtcgttgtcgatcggttggttgggttttgcggcgtgaggatttcggcggcgtcgtagtttcgcgagttatggtttagttcggcggggaggttcggttcgggtttaagacggcggtgtagattcgcgtcgttatt

SEQ ID NO: 10667 - DNA, 201 bp, Artificial Sequence
  Description of Artificial Sequence: Synthetic polynucleotide
tttatgaatatttcggggcgcgggagttcgagcgttgtcggagggcgtttcgggggaggcggtcgttgatgtaagttcggcgggtcgttgggtttcgttcggttgcggcgggagtttcgggacgggtcggacgggtcggggtagaggaggcgaggcgagttcgcgggtggttagttataaagttcgggcggcgagatagac

SEQ ID NO: 10668 - DNA, 241 bp, Artificial Sequence
  Description of Artificial Sequence: Synthetic polynucleotide
ttttatttttatatatttatattcggtcgtttttcgtttttttattcgtttgtcgcgcgcgcgcgcgatttcgtttatatatagcgcgcgcgacgtcggcggagatcgtttcgtttttttagatcgaacgtcgttcgttcgtttgttgaggagcggcgcgcgtttcggtttcgtttttttggcgtcgcggcgcggcgggcggggggcggcggtcggaggagttgggggtcgggttagcgcg

SEQ ID NO: 10669 - DNA, 201 bp, Artificial Sequence
  Description of Artificial Sequence: Synthetic polynucleotide
ttttcgtcgttttttaggtttttagtgaggttttttagttggtcgtttattatggtttttattatgaacgttatggttttcgtcggtcggggtatcgggcgtttgttattacgcgttaggtatcgggtacgttcgcgtttattttagtattaggtttcgcggatagttttcgtcgcgggttcgcgttttacgtttggtatc

SEQ ID NO: 10670 - DNA, 201 bp, Artificial Sequence
  Description of Artificial Sequence: Synthetic polynucleotide
gattcggtatgaggagttcggtatttttgttttttagttttttggaagtttttttttggattggtcggcgtcgttttttcgatatttgggggttgaggtcggtatttcgggtttgcgtggaggggcgagcgttaaggttgcgagagtcgggtttcgatttgtaattattttttttaatttttatggagtttcgtttcgcgt

SEQ ID NO: 10671 - DNA, 201 bp, Artificial Sequence
  Description of Artificial Sequence: Synthetic polynucleotide
gcgttcggtagagagtttttagtcgtttcggatttcgcgtagtttcgtagagacgcgcgtgtcgttcgtacgggtcggtattcgggtcgttttcgtcggcgtgttaggatttcgtatagaagcgttcggacgcggacgtacgtagtcgcggttacgattttcgtcgttcgttcggttcgtgttcggttttggttagtaggg

SEQ ID NO: 10672 - DNA, 201 bp, Artificial Sequence
  Description of Artificial Sequence: Synthetic polynucleotide
ttttttcggttttttttttatttttcgttttcggggtttttttttgttgagcgggggttgtcgggatttgggattgcggggttgtttcgatttcgtagtcgttcgcggtggaagttagttcgggtttggttttgagcgcgcggttggggcggtcgttgtttatggtgttggcgcgggtggcgcgtcggtcggcggggtttg

SEQ ID NO: 10673 - DNA, 201 bp, Artificial Sequence
  Description of Artificial Sequence: Synthetic polynucleotide
tcgttcgcgtattggggttttcgaggtgtgatgttatttgttcgtagaatcggtttttttcgcgtcgtttttttcgcgtttttattttagtttttttttcgtcgttttcggggttaatatggtagcggcgtcgtcgttttattttcgtaatcgtacgattcggttggtagggtcgtcggttcggattttcgagatttatat

SEQ ID NO: 10674 - DNA, 201 bp, Artificial Sequence
  Description of Artificial Sequence: Synthetic polynucleotide
tcgcgggcgcggtttttggaacggattttttttcgagtcgcgttcgtcgggtcgtttttttttcgttcgtagatttcggttcggtttcgtcgtcgcgcgcgttttttttcgttttggttttttttttttcgttttcgggtttcggcgttttcgttcggttcgagcgcgcggtttgtttcgttcggtttattatggcgcggt

SEQ ID NO: 10675 - DNA, 201 bp, Artificial Sequence
  Description of Artificial Sequence: Synthetic polynucleotide
ggttaggttttttaggagtagttggggaatattcggcgattttggcggttgttttttggtggcgtagggagttcgcgtgtttgcgagtgcgtgtgtgtgcgaagtttttcgggtaagtgtgttagcgcgcgtttgggtgtgtgtaagggtgtgagcgtgtatacgtgggtacgggcgtgtgcgcgcgggggtgttcggttg

SEQ ID NO: 10676 - DNA, 201 bp, Artificial Sequence
  Description of Artificial Sequence: Synthetic polynucleotide
tttcgtttttattcgttttttttatcgcgtcgttttttcgttttgttttgcgggtttaggcggaattcggaacggtcgtttttttttttcgtttttcgtcgtcgttttttttttttttttttcggttttttttttagtttcgggtcggagcggggtgtcggcggcggtcggttcgggcggcggcgtttggttatgtcgtgt

SEQ ID NO: 10677 - DNA, 201 bp, Artificial Sequence
  Description of Artificial Sequence: Synthetic polynucleotide
ttaagttcgttgggcgttcgtttttgcgtatcgcgttcgtttttttcgtttgtgcgtttgggtttcggcgtacgtattgtatttgtcgttcgtttttgtcgtgtgtgtgtattgtcggggttcgttcgtttacgttcgcgcgtgcgtttttatttttatttcgtattcgcgtgtacgatttattcgtcgtcgttgtgcgcg

SEQ ID NO: 10678 - DNA, 201 bp, Artificial Sequence
  Description of Artificial Sequence: Synthetic polynucleotide
tgtcgaatgaagttgagcgttttagtggaattagggattttaggggtgagcgatcgcgaggggagagcgacgaaaagggcggtcggagttggaggggcgcggagttaaataaaaaagggcggtcggagttgtaggggcgtcgagttaaatacgttatttttagatggggggttttaggcgagttgtttagtttttttgagg

SEQ ID NO: 10679 - DNA, 848 bp, Homo sapiens
acggggtcgcactcgagccggcggagcatccctagggagggggcgggaggcctcccctgcccagctccgagccggtggtgcagcgtccgcccccggtcgcgggcgcagactggcggccgcctccgggccacgtggtgcgcgcggcgggcgcgtccgaggagcctgcggctgctcctggctcacagcgctccgggcgaggagagcgggcggacgccgggggctgggccggtgcgggcggcgaggcaggcggacgaggcgcagagacagcggggcggccggggcgcggcagccggcggcgtcggggccgcggcctctgccttgccgctcccctcgcgtcggatccccgcgcccagggcgcacggtggagagggacgcggcggagccggccggcagccatggaaccggccccctccgccggcgccgagctgcagcccccgctcttcgccaacgcctcggacgcctaccctagcgcctgccccagcgctggcgccaatgcgtcggggccgccaggcgcgcggagcgcctcgtccctcgccctggcaatcgccatcaccgcgctctactcggccgtgtgcgccgtggggctgctgggcaacgtgcttgtcatgttcggcatcgtccggtgagtccgctgcgggccggcgccgcagggctggagcccggggtgagggtggggatcacgaacttgagaccccaagcccgttccctggactccccgcgcctccgcatttcctgcaggggcacctggggcccagcgagaggcgaggccacttacatcgaggggaacacaggaatgtgtgtcatcgtgtgtatgtgtgtgtgtggtgcgggggggggagtgcgccgcg

SEQ ID NO: 10680 - DNA, 1230 bp, Homo sapiens
acgcagccccgagccccgagccccgccccgggggcctcatcccgccccttcgcgtccgcggctcgttttcccccactgagcgcccagctcccgcagtttccccggccgtcgagcgccgtgggcggggctccagggcggcggcgcctcgcggggagggtcctccgtgctgggggcgaggccacccgaggcagctccccgcccgcccccaaccccgccccgctctcggagcctataaagggaggcgacccgcggcccgcccggctggcatcccccagccgccgccagccccgccgaggggagccagcgccgtctctgaggggcgtccggcgccggagccatgaccctccgccgactcaggaagctgcagcagaaggaggaggcggcggccaccccggaccccgccgcccggactcccgactcggaagtcgcgcccgccgctccggtcccgaccccgggaccccctgccgcagccgccacccctgggcccccagcggacgagctgtacgcggcgctggaggactatcaccctgccgagctgtaccgcgcgctcgccgtgtccgggggcaccctgccccgccgaaaggtgcgtcccccgcccgccttcaggatctgctcagcccctctccgactccctacagggcctgctgactccgcagtgccctctcctcggcgtccgcggagtcccccaccttcttccccggcccgctgggtgcctcgactccccgcgttccccgctgctgcgaaggccgtggccctcgcctgcacaccgcgcccaggctcggtggctcttaactccgcgccccatgcacgccccctctctccctccttgactcctcccagcaccccccttctcctacccgctccatctggctttctgccccccatgccccgcctccccgtggccaggtgtcctgggtccccaggagcccctcgcccgagggacagagacagccccaggcaagttgaaggtccgagagcccccggtgggagaagcgggccggtggctgcgccgcgtgcgttctcactctgaggaagtgcgtggggagccgctgactccggatagcacacccttccgaggggactccccgattcctgggctgggggcctgccgcctggccccacgtctgacgtacggggcgcgagggccactgctccctggacttctgtcggaaccggacgcagtgggaggggtcgcagggcgcccgcggggcaggaaggatgcgggccgcg

SEQ ID NO: 10681 - DNA, 1094 bp, Homo sapiens
gcggcgctaaaaatagctggggggagggtgcgggggcggcggagtctgtaacctaagccgccccagcctccggggggcagaccccgcggccgccggccggcgtccggccttcccagcacccggcccagggctggagctggctgcagggctggcccgcggcgacctgggcagggtggcggctgctccctctcctcccaccccgccccgaggcgcagcgcgcggcagagcggctcggtgcccggcgggcgggcggcccgggcgggcctgcggtcgggatgaggacggcgcctccgctgcagagcgctggggcggcgcgggccgggagctcgttggcggcggccggcgtggcgggcggagcgggcctcggagcggaggtgagtgcggatgcgccgcctgggcgcgcgcggtgcctggggaccccgggctggaacgcggggcgggggtgtcaccgggctgcgcgggggtctccggcccggctcccgctcctgcgccctcgggggccgctccccggcggggccggaccctcccagcgctcgcggcgcccggcccggctcccccgacctcctcctcccgggcccggacgtgcggggcagcgagcgccggggcccggcgggggccgcagccttgcccggagcggagcgttggcagcgcggggtccggctccgtgggcagtttgggaagcgcccgggcaacgtactggcgagggccgcggagcgaggggctcggggagcgggacctccgggcggggctgcggggagcggggcccgggccgccccattcatcgcggatcggagccgggggtgccccagccgtgccgccgcctcctccgggccgcccgcccgggcgtgctggccccgcggcgctccgagcgcggcataggcttgcgagtcggcggtgtcagcgccccggacgggggtgggagctttggagcccaccctgggggagaccacgccgcacccccgcccagccccgcgcacccccagaggcttttgcagagccgggaagttggctggacgtctagacccgtggggacgcggcgccccgcgtggcggcggccggaagggaaggccaatggggctcgggggactcccgcg

SEQ ID NO: 10682 - DNA, 1979 bp, Homo sapiens
ccgccaccgccaccgctttcctcccagccaccccccacacccgcccgcctaccctccccctaacaccccccacacggctgcccgcattcctgcccctcctcggcctacgcgcgcctcctgcaaccccgacgcccccaggtccccagttcgccctccccctccggctcggagcccgagagccgcctgctctcatttcaaaacagcgataataatagggacgctgagaataacaactacgaccagcacggcgaaggcgcccctctcgcgggtcagaggtcggcgccccagctccgcagaacccggcgcccggccagcgccccctggcagcccctcccggcagcctcaggtccccaagacctgcaggcccgccccgaagccccccgtccgcccctcacggccgctccgagcccccgaggcccgccccggagccccctgtccgcctctcacggccgccccgggcccccacggcccccaggcccgccccggagcccccaatcggcccctcagagccgccgcgggcccccggccacccaggcccgcccggagcccccgtccgccccttacggccgacccaagctccgccgacctcccaggccccccccggagccccctatgggcccctcacggccaccccgggcccccaaagacccccggctgccccgaacccggacccgtaggcccgctccgggacccattattggtccctcacgatcgccccgggcccccaaagacccccgcccacccggccccgaccccccaggcccgcccggaggcccgcggcgcagctccgtcgccggggaaggcctgcaggccgcaaggccgcgcgaatgccccgtgcccgccccgaccaccgcccccagaccagcggcgcctctcaccgtgctccgagggctgcgcggctccgcgacggctcagcggcggggcgcgggcgctgcccatgcagcccgcggccgcgtttcccgggccgcgcggcccgagcggcaaggcggcggcggcggcggcgcgggctcgggcccggcagagctgcgagggacggcgggaggcgagcccgcccctcgggcgcgcccacggctcgggcgagagccgcggctcccggtgcggacgctactgatggggcgtctggccgcgggctcggcggcggcgcctccccggctggggccctcggtccatcgcgcaccgtctcagggcggcctctggctccaggacccagcggcggctgcggcgggagccggccgcatgagacgctcccgcccattggcccgccgtatccgccaccgccattggcccgccccggccggccgcaggggctgtgcacgtcacagcgccgtgagttagtgcgctaatggagtgaaggagagaggcgggattgacagcctctctggcggtccggaggcgggactaggaggacgtcccggtaacgattgggcagggtcctgcgtaagggcgcatgcgacactggaagtagcgagcaactggattggctgcctccgtcgcaaaggagggtgggtcttgcattctcgggcctgacgattggtctttccaagtgccggaagcaacagggatgtcgtctggaaacaaaatctggtattgaagcgcagggagacaaaacgtccacctctagagccgaggcggcggttgcctgtcgcgtgcccgtggtcttctgcctgcccccggacatctcgggccacgtccggcccggcctccggccgcgctgccctaacgggcgtcacggggcatgaagagctctgggcggctgcgaggggagggtaccggggcagcggggcggtcgctcggggctcccgcgcggtgactcttgctctgccgtcgaagagaacggccctcgggcgcgtcgcggccgcggctccagagcccctgggcctcgcgctctgagagcctgagccgcttgaggaggccaagcgcccacgaaccgcattccctgccttgctagttagttctccaacacgcgaaaaaggtagacg

SEQ ID NO: 10683 - DNA, 1930 bp, Homo sapiens
ccgctcaggcagcgcgctgccccgggctccggtagggtggggactggtcgcgaaggctagagaaggcaatggcaggggaggtcagtccctgccgcgggccggctgcagagcggacgttccgccctgctcccggccccctcttcgcccgccgggttcgccgtgtcgaataactgctgtccggagctttcgtgacgcggagcttcaactgctgcgatccggaagaagcgaaaaggagtcccccccgccccgcaccctgagcgcccgggcgtgcaaacgtgggtggcggagagcggctgccctcccctcccctgtcccccctcccctcgcggcgctcccgtgtgtgcgggtgtgtgagtgcgtgtgtctccctcgctcactctcgcacacgttccggcactagtgcaggcggcgagccggcggctctccgctcgctcgctccggcagctgcgttcccgcctcgccccgccgccgccgccgccgccgccgccgccgcctctgcagtcgcagccgggcatggtgagtgagtgaggtccagccgccgcgcgctctcccggctcgccgccggaccccagcctcaaccggctccgtcccagggagccagcctgcggcgggagcgcgctgcggggccgggcggctgggggacccgggcggccgagctgcgcctggaggggcggcccgtgcgctctcggttccaggcgcgcagggccgcgggaccccgtcttgggagcgggctctacgcccctcccggctccgagtctctctcctcgagggctgcgcgcaccctccccgcccgcctgcccgcggttctcctcctgctcccggagcgccagtcgccccaccccgtgaccggctccccgtcttgtcccgcaggacccgcccggacgggaccacgccgccgccgccgccgccgccgcccggagccgcgcttcgggtcctgcctgagccgagccgcgcgcggggccgcagtcaccgccggcgggggatggggctgcccaggaggcgcgccgagcccgcagggggagcgcggagccggcgcgcagcctgagagcccgagcagcccgcgccgggccggtccgtgcgcaccgcgcgccgccgccgccactgccgcccgcgcctcgatggcgccatcgccccggagccgctgaccgctcagcgcctccagcccggcccgcgcggcgggtcctccgagcccggcccgccgggggagcggcctgccgcggaagcctccccgcgccctcccgcccggccccgccatggcgctgcggcgcctcctgctgctgctgctgctctcgctggagtccctggacctgctgcccagcgtccacggagcccgcggccgcgccgccaaccggaccctgagtgcaggcggcgctgccgtcgggggccggagggccgggggcgccctggcacggggcggccgcgagctgaacggcaccgcccgggcgcccggaatcccggaggcgggaagccggcgggggcagcccgcggcggctgtggcggcggcggccagcgcggccgtcacctacgagacgtgctggggctactacgacgtgagcggccagtacgacaaggagttcgagtgtaacaacagcgagagcggctacctgtactgctgcggtacctgctactaccgcttctgctgcaagaagcgccacgagaagctggaccagcgccagtgcaccaactaccagagcccggtgtgggtacagacgcccagcaccaaggtggtgtcgccggggcccgagaacaagtacgacccggagaaggacaagaccaacttcaccgtctacatcacctgcggggtgatcgccttcgtcatcgtggccggcgtcttcgccaaggtctcctacgacaaggcccaccgccctccacgggagatgaacatccacaggtgagagcgccgcgtgccgcgcgccccggtctccccgcg

SEQ ID NO: 10684 - DNA, 3177 bp, Homo sapiens
tcgcgccagccccggggcctctatcctggcgggaagggcaggccgacccggcagactgcggcctctcgggagggaagaaggtgtcagacgcgcggagcaaccataaatagcccccctttcccagaagacggcacggggttcaagactcaggcgccgcatactcagaatgagagcagagactcccgccaggaaaaaaaggcacttaggggatctgctcattagcatgaaatgcaaatgagcccgcccggcctcatttacacaactctgtgcatggattcggcgaaagggcaaccagggagacgacggcgcagcagccactctgccacttcccccatcccctccccccatcggccggggcgggaactgagacgaccccaaccctctgcggtggcgggaggtgcgcgggggctgcgtgggtggtgcagccttaggagagtgaacaacgcccaggggtgatggcctcagcaaagtgaggggtggtgatggaggtcatccgacccatcccgccgcctctccgcagtggcgcaagcgccccaaaatctccggagagggaactgactgacccactaggttccgccgtgtctacctctcgcagatgttggggaagtgcttcccggcgtctaatcctcgctgttcccccctccaccggcgcccagcacacccgcggcgctccgctcccgggtacccacagctttctggagtggcgccggcggcaggagagagctagagccgactgagccccagaactcggggaggtaggcggggcaagggccggggtctgcgcgtgcgtgtgcacgcgtggaaagcacaaacccacgagggcccgctgccggtagggttaaggtgagtgagtgaaggcggcagacccgcgaagttccagttccgcggacactctttccctaagccacatagggacttaagagaaactgaggcacgaagttggggggtggcggtggtggggactttgaaggtcgagtcgataaagcccagctctgtgcttccgccccctcccacacactcgagacccccacaggttccttcttaggggtcctcgctctgctccgcagcccctcctggggatccgggctctgcggtccagcgcgacctgcctggggccacgtgttcaagcacgaagcccctgcgtggagtccacgcccttcaaaaggtccctaggggcaaagggatgaagcccaggagcgtcaatgtgaggtcaggtccagcgggttagggttacgaggtcagggtcgaagtctcagaattgactcgggagtatgaccaataagcccaagagatttgtggaggccacgcccagaccatgcctaccctagcctttctcgagctccgcccgtttctccaagactgggcccctccagcctgaagccccacccccaggacatccagctccgctccttccctcccccagtcccgcagccaagctcaactccagggtgggagattaaccaggtggagacctgggatttcgctctgggaccccctggtgacaaccctcacccccgtgccgcctgtctcctttcttccccaggcccgcccagagctgagctccgtcctccggctgctgcccaaatcaggggtcgtggacaaaggatgcctggggcctgcggccctacgccaggaccccgcgccgaatactctgattcttcgggctccctccaagggagtcccaaagaccccaatggccaataggaaagtgggttcggtctgggcagcagtctgattggctccagccttcgggagcggacccaggggcaaggggaggggagaggggcggtcctgggttttggggtgggaatcggattccagctgtggttctctccctgcgctcccgcccgcactgccacggcggacggccaatgggcgcgcggctcggggccggcggcgtccggcgattggctgcggggctgtctgggggcggggccgaggcttgaagttgaagtgagggatccagctgtggtgtgcgcggggctcctcgccgccgctttcgctcgctcgctccgcgtctcggccggaggaggaggctgtggcgccggcgacagctacggcagcggcagccaccgcggcggctgcggcggcggcatctccgcctccactcccgcccgggactgccccccactgtctccccgcccctcccggacagtgagcccgcggcggggcgggggaaggagccgcccccaccccctccaagcccacccctaaagagatccctcctcccctcccccgccgcctggcgcggagccgggacgatgctgaccccttagatccggctccagctgcgccgcgggaagagggggcgcccctccccggacccccgccctccgccgctgccccccttttcgttcgccctctcggggcggcttcgccgaaggtagcgccgaatccggcaaccggagcctgggcgcgaagcgaagaagccggaacaaagtgagggggagccggccggctggcccgggaagccccaggggcgcaggggaagcgggactcgcgccgggcggggtttccctgcgccccggcgccccgcgggcagcatgcccctgcgggcagggggagctgggctgaactggccctcccgggggctcagcttgcgccctagagcccaccagatgtgcccccgccggggcccccgggttgcgtgaggacacctcctctgaggggcgccgcttgcccctctccggatcgcccggggccccggctggccagaggatggacgaggaggaggatggagcgggcgccgaggagtcgggacagccccggagcttcatgcggctcaacgacctgtcgggggccgggggccggccggggccggggtcagcagaaaaggacccgggcagcgcggactccgaggcggaggggctgccgtacccggcgctggccccggtggttttcttctacttgagccaggacagccgcccgcggagctggtgtctccgcacggtctgtaacccatatccttcggggcacgacggccaggcgcggggtcagaagggggacgggccgcaccgccgggggtcgggggggaagaagacccaccgccaggtgagtcgaagtgagcccggagggtaggcggatggggggggggctgccagggaggggagggggcaccagagtgggagcggagacgcgagcaggtctcgtcggtaacccgggcttaccccacctgcg

SEQ ID NO: 10685 - DNA, 2195 bp, Homo sapiens
ccgccagctccggccgctaagcaaacattccctccaggagtccgagaagccggtgtgcgaggggaggaaccagcctgaggtttatcgctccagcaactccgggtgattcatagagtttagactcccggttgtcgtagaccgcggcaggcacgcaaacaagcagcccgggagataccctcccctttcccagcccccgctcctccaccttgctaccccctagcccgtgaccagctgcctcccctccccctcgcgggcgctcagggttgagcaaacactccgggccgcccgccccgccaccagctggctccgaccggcgcaccgctggcgatcccccaggcaattcggcgtcatgagaaccggcaccccgagactcggcgccctgccctccctccgcgtctccagggccctggccaggcccaacaacctctccctcctctgtgcgcctcagcccctacgggcctctggcgcgggctaactaggcctcgctgcgggcccccaggactgcgcaccccaccccccgcgaggccagcagccccgggggaaggcggccggaaaatctcttgtttatcgggctggataagtaccagcctggattcgcttcccaatttctgcggtccagcttcagcagattcctggggccggaggggaaagggtggcaacccacagatccaccccggaacagggagtggggggtggggctggtgggaacctgacctcctggaaaggacggactcggagtcagagccaacgtgtcccggagcgcagaggcccagggggtcgcgctaaacactgtacctcggggaacaaaaccgtgaaggctaattaggacaagtcggagcagggaacggggacgccgggaggggagagcgcgctccgagttgggcagaacctggaacggtcacaggaaacccgggcgcggggtagtcgggccgagggggacctttgcccacggtccagagtggtctggactcggcccacgcgtgagaggagcgcttggtgacgatcccacgtacgcttggtgactggtggaggtcccagagaaggaccgtgcgtgcaaaaggcgaacctcggtgtgcggtgtgtccacgtgtgcaagctggggaggggagggggcgcagaaggcgtgacaaagacggactctgtcttgagtgtgcgcctcgctccggcccgctcccagcgaactgtgcctgaagtgtgtctcacgggagggccaggacgaaggtgacaaaggctaggtgtcccccacggagacgcgccaaggtagccccgcgcgtgtccgtaggcgcgctctctggaagacgcggtggggggtgcgcagggctgcaccctcacaccaattgccccggcgaaggccgagcccagaaagtgagtgcgcgtgagtgtgcgcgcgcccgcatgcgggggcgtggcagtcaacagcaacaacccacacgccggcagggccagaaactcccatctccctcaccagccggaaagtacgagtcggctcagcctggaggtgagtcggggcggggagggccgggcaggctttgttcctgtgtaaacggagcgcacgtacctggagcgcggcgggcgcccgattagcgccctgaatggaggtgatgtaacggtgatgcaggctccagcccaccctcgccgaaagcaaggagccctgcctggggacaggcccgcgcgagagcgagcaacccagcgcgcctggctcagcctcggtcccagggagaggcaggccctgcgtcccggcccgggccccgccatcccagccaggaccgggcctggcccagcgccccgcgccgcgtccctcccacccccgcccgccccccgcctggggctggagttggccccaaacgctgcgctggagcggggccggcggcgagtcccaggtaagggctgctgccttcccgctccgccgcccggaagagtcgggtcgggacggcggggagtgggcgagggcagaggcggggggactggacatcctgcgggctggggacgccgcgccaactccgctcggtcgctgaaagttttcaaacccgagccggctggggactgggggggtgggggagcccggcgctgcggctcgggctggagggaggggaaaccactccataatcggggtctccaagaggagcccctccaccgcctgcctctcggtgggagtccgcggtcactctctctcgtgggtggcgtcctctctgccg

SEQ ID NO: 10686 - DNA, 2063 bp, Homo sapiens
tcgaggagccgtggaatggaggatcacggcggcgtacggagcaccggggaggaatcgtggggtgcgtaggcgccggagcgcccgggttcggcccggaccgaaggcttgcgcggtgaaggtgtggtgtctgtgctccggggaaagggctgtctccccgggggactgtttcgcagcgaggcttgttttgctcgcagctgggcgctccctggggagcgactgagcgcaagggcgggccgggaggcgcgaggcgagcacgatgctccagggccccaaggactcgtgtgcgtgtgcgtgtgcaaagtggggcggtgcagggcgtgtgcacggcacgggcgagacgcgcgccggtgcgggcgccgggcgccgccgggcgcaattacagcataaagcccgggcgccgcggggcgctggcccggagaacccaccggacgcgcagaaccggatcggcacccctcccgccagcaccctaacgcggagccacagcgcccagggaccggagggcaggcggcggcggtaaaggacaccacgcaagtctccacgtaacccccccgagcagtgcaagctcccaggactggcgcgcgtcccggccactcggagcgcgcaccgctcgcaccccggcgcgctccccgcgcggtgcagggaaccacagcgcgggcgggtattaaggggaaaggaggaggcgtggcctggccgaggagccaatgggccgggaggggcgcgcgggggaggagctcaggtgcagagtgccgattggccagttcgccctccggtatgcagatacggtgggagtcacgtgctaggggccgggacgacttcctgttggaggccaacgcggggcggggaagggggcgcgagcgccccgtctggctgaagcggggggaggggggttcttgtcagttagagcaacaagatggccgcggtggcagctccgcacctcagcgcgacggccccgggagccgtagccgccgccgccggccccgccgccgcgcagtcttgagcgccgcccgggccgccccctgacagggcagtcccagcgcccgccgcgctcccgccgccgtcaccgtcgcagtagccgcgggcccgcccgagccggaggcggagggagcggagcggccccgcgcccagccgtccgcagctgccaccgccgccgccgccgccgcctaggacccggaccccgccggagccgcatcccgccgggcgtgaggaggaggacgcgtcgcggcgttgccggggccggacctggacctgccgggacgcgccgccgcccactcgcccgcgccgccgccgcagccgccgccgccgcccgcgccgggacctgagtccgtggcgccggcgctgagcgggcccccgccgcccgcgcactcccgaggccctcgggcggttgttcgtgccgccgccgccgccaggcccgcgccaccggagccccgcggagccgccgccgccgccggggacggagcccaggtgagcgcggcagtccgcccgctcctcgccgcagccgcaactttgccgggaggttcgcgggccctttgttcggccgagccgagccggggcgggcgctggcccctagcgacccgcgtgcggcgccaggccccgggccggccgggtttgaggggagcggcgggaagcggccggggccggggcgcgtgtgtgctagtgtgagacggggctgtgcagacgcccggtgtgcatcacaatcaaacgggagtggaatggagggctgaagatggatgtgccccctcccttttaaaactcatgcagcggtgaaattcggtcctttccgggcagccccccgcagattttgcactggtgatggcaggcgcgaacccgccgtgttttggtgcaggagcccggtgccgttgtttgggggaagagaaaaacccggggcgtgctgcgggtgggcggagaaggacccctgggcgctctgcggctctgaaatcaggtggattttctaacggtgctgcggactgcggagtaatgcgtatgaggaaaacgagccgtacaacatctgtcctgttatcagataacgtaacccgagcgcctggttgccgcctctgctttaagcg

SEQ ID NO: 10687 - DNA, 816 bp, Homo sapiens
gcgcccggagtgggaggaggggaggcgttgcccgacgcgccctttcaagtctccgcgctcccccccggcggcggctgcccgggggcggtggctcggcgtcgcctcccccgaccgccccctccagggcccctcctccgtgccgcggccaggctgcccggccggcggcgcgctggaaatatgaagagacgctgcagctgcggtggcggtggcggccactgcagctcagagcggcgcacgcggcggccggggcgggacgcggggccgggcgcggagaagtcggggcgggcggcagagaggccgggacgcggaccgggccggggcgcccacagccgcccgacggcgcccagagagcgcgcgccccgcagccccgcgcctagcccgccgggcatggggcgcgcggcagccgcctgaagccccggcctggcccggccgcacccggccggaggcggagggcagagcgcgcgcccagttgcccgggcaccaaatcggagcgcggcgtgcgggaggccccagagcaggactggaaatgtcctggccgcgccgcctcctgctcagatacctgttcccggccctcctgcttcacggtgagttcccgagggccactcgagcgctcccagccggcggaggcagcccgggcgccgcggagcccgcggaggcgtcgggtctggatcgcggcacggcctacactgtccccttggcggggcgggtccgaggggagccccgcgcctgccgtctcagccctgggagagggggctctgcccactttccgaggcttgggaccgctctcccccagggcgcccggagctctttgctgcg

SEQ ID NO: 10688 - DNA, 368 bp, Homo sapiens
ccgttttctccacacaggcgcgccgggaggcttcgctctttggccgcgcgactcgggcactcacgttccgcgcagcgtcgcggtcggctccgcgcagcagcatcacccgcaccacctcgctgtggcccatctgggacgcgatccacaggggcgctgtcccgtcctgcgggaagaggaggcggcggccgccgtgactggggcgcccggccccacccgctcacagaacgtctttaacaccaggggtctgaaagcgaaaactccgggaaggcactccctgaccgcagatcacactctgcagctgatccacaccgcccaggaggcagtgagaaaagagggggtgtgtgtagcccacggacgcagacggcacg

SEQ ID NO: 10689 - DNA, 1411 bp, Homo sapiens
gcgggctcccactccgccgttaggagcctttcccacaactctgagaaccggggtgcgaagaaagaaagggcgaaagggccgctcaactcccagagagtagccagcgaaagactcgaggggccccctcccgcaggaccccgaacaactgcagcacctcctcagcccgcggggtccaccaaggagaccctcacaaacaatagcatctgcggcgaaggaaccacccccgcaaagggcagaagcgccagatcctaccagccaattacccagacgcgcatcgcgacccgcaagttcgggcacgctccgcccgggcgcaggcagcgggaggggccgggcacgcccgtgggggtggtctgggtacgggtctgatccgggggcgcgctcgggaggggtctgggtctgagccgggggcgcgcccgggggagtgggctgggtctggggcgggggcgcgtccggaggtgggggagtctggggtgggggcgcgcccgtgggggtggggtggggtgtctggcccggggacgcgcccggggaggcgtggtctgggtctgggccgggggagagccgggtgcgtgctctgggtctgcgcgggggagcgcgcctggtgcctagatgtttggtaccgagcgggtgggggacgccgggctcggagccggcggcaagtctcctcctggcaggtaacaagcctcctttgcagccttgaaggcgccttggccagggccatcccacggcccgggcccccagagcccccccacggccccgaatccgagcagcccctggccctcaactcgccccggaaaggccgccctcccctccaatgtgtggcgcgccccgatcgcctctcactcgtggaacaaaagagcagctcccgcggagcgggtccagagtctgcccggactgtccgatggccctcggccctctgagcgccgcggctgccgggctttgtgtccgcgcggggggcgggaaggacggccggggtccccagtgcgcgtcccgcggagcggcgcgcggcgcccgaactggaaagttgtcgccggcgcctgtcgcctccacgccgccccagtccccctccgcggggcgccccattcattagccaggagactgggcgcagggccgccggggcgggcggggggcttaccttgctcttgacttccactgcgctgcaatcgtagaatcgcaaggtctgagacttgtgaaaacttcggttcatggtttcggccccggtcagcctcgccgtcgccctcgctcctcaggggccgcagaaagactcccgggggcggcgcccccaggccccggccccggccccggcccgcgctcgcttggccggcgggctgctcccggtgctgcgggcccgagctgggctggccgcgcgcctcagggactccaggggccgcgcgcgggaggagcgcgggggacg

SEQ ID NO: 10690 - DNA, 1487 bp, Homo sapiens
ccgcccctgcacctcggggacgtgaccccccccccaggctgacccgttcctcgctctgtcgtccccaggtggaggaggagctgacgcacctccagaagaaactaaaagggacagaggacgagctggataaatattccgaggacctgaaggacgcgcaggagaagctggagctcacggagaagaaggcctccgacgtacgtgtgcagggatgcgggagcccgcggcggggccaggccggagccccggggccgggaaggcggggagagccgcagggggaggaggaagaggaggaggagaaggcggcgcctcccagcgctttctccaaataagtcccgaaaaggggcactttccagcagctgtggccagcggtgccgacgtcaggccctcccccagcggtgctgacgtcggcggtccggccgggtgacctcatcgccccgacggcagccggcccggggggcggggagaggcgggggcggcccccgcgcaggcaaaggcttggggggccggggcgcggctgtgcagctctcgccggagccgagcccagccgagcgtccgccgctgcccgtgcgcctctgcgcctccgcgccatggccggcctcaactccctggaggcggtgaaacgcaagatccaggccctgcagcagcaggcggacgaggcggaagaccgcgcgcagggcctgcagcgggagctggacggcgagcgcgagcggcgcgagaaagtgagcgccccggcctcgggccccgcacccgcagcctcctcccccgcgcgccctcctttcttcccggcttcccgcgctgcccgcccgcgcgcagtcctcgggccgcctttttacgccctcggacgccgatcgccgacccacatccctgcgcccgcagccaggaccccctacttcctccgccgtcctccttcctgggcctgggacaggggagggggcgccgcctccgggtcgggcggggccggccaagcgggaaatggggggatggggcggagggggtgagcgatctccgggtggagaagtggagcggcgggagggggcgtatcgtgcaggctccgactccggggctggcgccggggtcccgggccgaggggaacccgcgaccggacttgtgggggagaatgaggatgaaaacgtggagcttccattgtctagggtttgaccggccgacagggatttcgacgggggaccggggatctggggagggggtcgcactttctcgcctctttcgcggcttcccggcttctgcttgcttccctgaccgttcccaggggcgcggcggcgacgtgtctgctccaggcggcgggggggatggggggtggaggaagttcagccccaagccgcccgcctttctccagctgattcctgcgggaaccggggcggcgggaccctgcctctctccagaaggccccgggaacgctggcgcggggccctgaacccacgatcgtttgagcgcctgctgtgcgcctccgccgcgagtcgcagggcccg

SEQ ID NO: 10691 - DNA, 602 bp, Homo sapiens
ccgcccggccaagctatcttctcgctagcaggtgaggcccgtgaacagccaagctccccttggcacggcggaaccgcagtggacgcgtggaggggctccgtagaggagggacctttgcttgggatgcggggagctgtagtctcttatctgcacccagcttgttagttgtacgcctgcaggactacaatctcagcacaaagcaggattgtagggcggtgcggatccctggagggagacagcgcggtgcgctcctgccggccatgctggctggggtggtgtcttaggcggttccagccgttagtcacagggcggccggactacaatcccagcatacaacgggagtggaggtggtgaccttgagagagggcctgtgctgtgcgcgcctcgcggggcatgctgggagcagtagcatcttagctgcttccggccgctggtcgcagggctgcgggactacaatcttcgcatgaaatggaagagagggtggtgcggatagcttgaggaaggtacggataccttgagggaggtatggatacgttgagggaggtacggatacgttgagggaggttacggatacgttaagggaggtacagcagcggtgcgcg

SEQ ID NO: 10692 - DNA, 628 bp, Homo sapiens
ccggcatccgccgtattacagcggatgggtgcatgcgggcggtgacccgagctcgcgcgggctgcggaaccctccactcaccaacgccggcgccgccatgggcccagggggctgggtgaggccgtgagagtcggcgaggaagccggtcctgcgggctcggccgaccccgggctccggctctgggctgcgagggacctcagtccccgccgtcgtgtaaaatgcacacaaggttcgcggcgccgcctctgcgcgccgtgaggacacagggctgtcgccaaggccccaggaagggttttgcagacgcttgtgggggtgggatcgcggctgacataaaagcgtgtaagtgggtcctatcctcctcactgtccgtctctactcggtctcgaaaagtggcccctgtctggcgttctacccagtgtagcgttggcaaccacagcagccgcaacctaacggcggacgaagactggacgccggaagtcccgcccacgccgctacgggaacgcccctctgcgccttccgtctatggcttggggtcggcttccgtcccttgtagcactgccttctgggtaatgtagtttgacggaatccgggtggtacctggagcgcactttctgttctcggtgaggcg

SEQ ID NO: 10693 - DNA, 215 bp, Homo sapiens
acggagggacgggccgtgcagtgcagccggcggggccagggccaggccgagggcgcgaggtggcagccggcccggggaggcggaggctgagcgagcggtggtgtttgtggagctgtcggctgcggtggaattatgaaaaatagcaggcatcggagccggccttcagcttcgattaggggagatgggacatgacaggtgcgatcaatacgcagccg

SEQ ID NO: 10694 - DNA, 2638 bp, Homo sapiens; identical to SEQ ID NO: 5191

SEQ ID NO: 10695 - DNA, 2172 bp, Homo sapiens
acgggatgccggtctcggccgcccccaccaattgatccatgatcggcttggccagggcgcccggcagcgagagcgccgccgcgccgttgggaggcagcgtcagcgcggggaagaacggcggctggtgacccagcaccgcgctcatggcgaagtccggcgcccggtgaggtaggaacggatggtaggccatgcttgtcccaggaatgaccggatctctcatggagaggctcatccactccaggcggggcgctgggctccagccggggacaagtccgcagctgctgtgttttgttgtttttttgttgttgtttaacagcagcacataattcaaaaggggggaaaaagcaaaacaaaaaagaaagaaaaaagaaaaggaggcagaaatcacaactaatgcacttcaaagggaggaggggaagtgtcttttggagaatgggaggccgcttttaaagagggcaaggcgaaaaatcagcaaacatagtcgcgcgggtgaccgtccttgtgccttgcgtttttaaaaagccgctcctgaacgtcggtttcagaagcgagaggagcgagcagggtctcgactcgcgcccgagccctgccgctgagctcgaaatagacactccagccctgcgtcccaggaatctctctccagcccctaggtcttttgttgcaaatgtgaaaggttctcctagaagactttttacctttctttttcttcttcccccgccccctatctgtcttcctctccctctttctcgctggtggcgtctgcagctgtgctagacccggctttaacagggagcgagagagcggaaaaagtctctctcctttaaaaaaaaaaaaatctgatttaaacccccttctaccagcgctatcaaaacttgaattgcaaactggcttccgttcgccgccctcctcctccttcctctgctccgagcctccggagggtgtctcggtttcaatccaaatcttgctgggctcttctcccgtgcctctctctcttccttgtcctaaaacgtgagcgaattcgcttcctaaatctgtgtccaggcgcgcagggcagggaggatttagagggggaaaaaatggaacagagggaaagagagggaggggagagagagagagagagagagagacggagtcggagagggagggagcgagagaaagcgagagctcctcgccaccctccgccgcctctagaattcaccgggcgtctgctcggcggctctagaaggtcgggctgcgctgtgggctgcggggagccggaggcctcttgattggctctttgacgctttcggaccaattgtgttgctgcataggcgtggttttcacaggtcgagtgctgggggatagagctgagttataaaaagaaggtgtcggaaactgtaacgtcgcagcgccgcatcggtactactgcctgtcctgtgaatatgtcaacatgatcagagggcgggcgggagccactggggagcgcgcgcgcacagagtcgcctctaggtggcttatcgagagatcgctgcagcccctgagctcgctcgctcgctctggttcagcccacgtctgaaatgcctcagtcatccagccggggatcgagggaggaggcagggccaaggaggaagggggagggagagagggagggagccagcgagcaggcgagccgggcggggaaggcggagagcgcgcccgggcgccgggcaggggcgctcgcctctcttgcactccgctcgcctctccgaccgccgcggccggttctctctccagctctccttcttctccccgccccgggcgagccgggcgggtggccgagcctccccgcgagctgccatccggccactcggttctacaaaagccggcggcagccgagaagcgagcgccgagactccaggcttgcgtgctctccagccccacgtggagccaagctccgcccggccgccgctgaagggctcccgagctcgggtgtctcggtgctggtctcccctgcgtctgggctgggggagcacaaggatgcggccatatctcagcacacgcatgtgtgggcttcctctccactgcgccccacccgcagccatgtgcgggtacccaaacacccccggtgtatctgtactcgaacacgcgccaacacactgggactgaaacacacaccgaaaaacacgtacacacaaacacgtacacagcctgcgcg

SEQ ID NO: 10696 - DNA, 2548 bp, Homo sapiens
ccgggtgggcctcgaaggcgaggatggccagaacatgtccctcgtgacaccccttgcccctttctagggccgtgcggcgagaggcgtccgagcactgccaatgtgacgcgggcccacggccgcatcgtggggggcagcgcggcgccgcccggggcctggccctggctggtgaggctgcagctcggcgggcagcctctgtgcggcggcgtcctggtagcggcctcctgggtgctcacggcagcgcactgctttgtagggtaagtaggacccccaggccttgcccagctggggtccccggcgctgggccccgcacctgccgggttgtccggcgggcgacgcgcgggaaaggtggtctctgctgccccctggcggcggccggccccgggcttccccatctcaaggcgccgcgcccgccccgccaggatgccagcccggagggggtggcacggccgggcgagttcgccccctctgggacgggacccctccccggcccgccctccgtgcccccaggtggagaaagcccggcatgcgggcggaggggcagggtctccgaggggcctgcggggtgtgcccctgtccttcctgcgtctcagctgccgctcgacccgcagcgccccgaatgagcttctgtggactgtgacgctggcagaggggtcccggggggagcaagcggaggaggtgccagtgaaccgcatcctgccccaccccaaggtgagaaggcagtccccaggcccccaaggctgggcaccgcacccccacccgtgcttccttgaccctgcgccgcctccccctcctcagtttgacccgcggaccttccacaacgacctggccctggtgcagctgtggacgccggtgagcccggggggatcggcgcgccccgtgtgcctgccccaggagccccaggagccccctgccggaaccgcctgcgccatcgcgggctggggcgccctcttcgaaggtactgggcgtgggtgagccggcgcgtggtgggaagaactgggggtccgaggtaatagagtgtagggaggccgggttgccttggaaaaatgctgcctgctctttcaaagggggaggaatcaaggggggtggtgggaaggggaccctcaaggcggggctcttgccctccaaacctgagccttccaccccttccctgcagacgggcctgaggctgaagcagtgagagaggcccgtgttcccctgctcagcaccgacacctgccgaagagccctggggcccgggctgcgccccagcaccatgctctgcgccgggtacctggcggggggcgttgactcgtgccaggtatgaacccagtctgatgagaaaaggccggctgagccttcccagggccactacggcctcttttccttccacgtctgtctgtcactcgacttctctgagcctctctgtcctcatccctaaaatggacacaagtggcaagctcacacctgccaggcgtaaggcaggcgtcatagggggcaggtgaatgcagcgtcctctctcttggccccgcagggtgactcgggaggccccctgacctgttctgagcctggcccccgccctagagaggtcctgttcggagtcacctcctggggggacggctgcggggagccagggaagcccggggtctacacccgcgtggcagtgttcaaggactggctccaggagcagatgagcggtgagcgccctctttccaatgccccgtccccagtgccccaacggacaaccgtgggacaagcccgtttccacccggcccatgcccattcccagctcccttctgcctcgggaaagcctgtctccttccggggaaggagtgagggggctagggccccaaacagagggtgagctgacccctgtcccgcccgcagcagcctcctccagccgcgagcccagctgcagggagcttctggcctgggaccccccccaggagctgcaggcagacgccgcccggctctgcgccttctatgcccgcctgtgcccggggtcccagggcgcctgtgcgcgcctggcgcaccagcagtgcctgcagcgccggcggcgatgcggtcagttctgttcacccggacccggacggggggcagaggggagggggcctggccagcctctgaccgccgctccgactcctgtccggtccgcagagctgcgctcgctggcgcacacgctgctgggcctgctgcggaacgcgcaggagctgctcgggcctcgtccgggactgcggcgcctggcccccgccctggctctccccgctccagcgctcagggagtctcctctgcaccccgcccgggagctgcggcttcactcaggtaccccgcgccctccagcccagcccagccctggcccggccccacccgcgcggcacagccactttctccgccgaggcggtaccctaaccctgtgcctccccaggatcgcgggctgcaggcactcggttcccgaagcggaggccggagccgcgcggagaagccaacggtaatgacgccccctgccgaccttcaggaggggataggctgagggcctggacgaggtcggaagcgcttctactgcagctccg

SEQ ID NO: 10697 - DNA, 919 bp, Homo sapiens
acgggagccgctgcagggtcaggacgcaaagactccgaggcccttcaggccgaggggacgtcgccctcgccccacccctgcgcccggcaggcccctggtctcgctagcacctgtcgttcagggctggacccacgcggcgggcgggtgaggggtccctggcgcgcggccaccgctcgctctgtgccaggtgcggtgcggcagcgggagcgcgcggagcccgaaccctgtacgtgtggccccgccgggccggtcgctgcgagcctcgccccggtctcggccaccgccggggaggacgacgacgacgtggtgggggacgtgctggcactgctggccgcgcccctggccccggggccgcgggcgccgcgcgtggaggccgctttcctctgccgcctgcgccgggacgcgttggtggagcggcgcgcgctgcacgagcttggcgtctactacctggtgagtgccggcgcgcgggagggcgggtgagtccggccgggcgggagccggggtgaccatccgtgcccctcgcagcccgacgccgagggtgccttccgccgcggcccgggcctgaacttgaccagcggccagtacagggcgcccgtggctggcttctacgctctcgccgccacgctgcacgtgggtgaggcccggggcgtgggaggatcgcccgctctgtcgcccaccccgccgcccgcccgcttgaccacgtcccaccctcccccgcagcgctcggggagccgccgaggagggggccgccgcgcccccgggaccacctgcgcctgctcatctgcatccagtcccggtgccagcgcaacgcgtgagtgtaccccggcccggaccccacacccgcattcgctcggcctccacaagctggaggtggttaaacaggcactggacggggcttccgcccgttcacaccccaccg

SEQ ID NO: 10698 - DNA, 2488 bp, Homo sapiens
gcgcagcccggtaggggcggccggactcgggcaaacgcagctccgggtgggagcagggtcacttctgctcccgagcggctggaataaaaatgcggattgcactcccccctcctccctatccaaagtgtccagccttgaagacaaggtggagggaggagagagagggcggaggtgtaaatccaacttaacccctgcgcgcgccctcgaggcggccggctgcccccgccccgccgtgtcccctcattaaggaaggccccttcgccaggggccgccaacgcccgcggcttccggtcagacggtgcacctgagagggacaccccgtcccctcccgggagggacccgggcctgctgaagtgggctcaactctgcaaaccgcgtctcaactccccgcgccgcgccggggaacccctccctgacactcaacgcttcccgtcctcacatccccaaacacagtccacttcccttctcgtggcggccgcggcaacccgagcccggcccccgccccgccgccagagaacgcctccctcgccgggacgcggtgccgagcccgctgcacaccgagcggccgtggcacaataccgcggcgctgcgcgcacaatcaccgccccccaggacccgcggcgcgcaccccgggagtggggtgcgccccgcgaccctgggcgctcagggccagacacacctcttgggcgccccgcggcccccacagtgcagccttcatcgccccccctccactctcgggcacactcacccgccccccgccccagcccactcggcccagggcgcagccgctcccccgcgccccctccctcagccccggcaaaggaagctccccctgcgcccccctccccagaaccgcccccagcccctcgcccccctaaccgcagctcaacggccggcggcagcagccggagaaggggggcggcggcccgggccccggaaacggcccgatcgccgggatccgggccggactccgtacctgggctggaagcgaggcggagatgggcggtcgggatccgcgagtgagcggggcgggcggcggtgacagccccacagctccagctgctgctgctgctgctgccgccgcggctgcccggggagaggggctggcaccaccgcggcgcgtcactgcccggcccgggggcgggggtggccaggaggagggcccaggcgagcagcggcggcagcggcggcggcgccgcggcccggaggaagggggagggggcaccgggcacggggaggcgggagagggggcgggaccgggcacggggcgggggcgggggggaggggagcgcagggagggcgcaggcagggggagtaggaggagcagcaggaggaggtggcggaggggcgggtgagagggaggagtgggcacggggggaaggggagagaggaaaaggaggcacccagggagaggggagaggagaaaggagggagagaggcgcggggggagaagaggaggaaggagggggagctgggccaggtagggggggataagggcgcgctggacgcgccgccgtgcgcttcggtggggagcgcgctcttaagggggaagcgcttcgaggaagatccttgcacggggctgagcccggaaagaaggcgctgggatctgtgcctacccatcgctcccggaggctgcggtctctgggtccggtgggggctggggggagagggcacccggcgggctgtctgcggtcaggccaggagagggagacttggcccaaataaagtgactcaggcaccctcaggaactctcggcgcccggggccccttcgggcagccttcgacccccatgcgtctttcgggtccccagggacgcgggtacttgtggggcggggctgccgggcctcggggttcggctcccccgggcggccggagcgagaccccgggctgggaaagccaggcacgtggccggctctcggccgtacccccgccccacccccacggcagggcccccagtgcttgatcaagttcaagctcgagctcctcggcgcgctgcccaccggctgcccctccgcgcccctcccccttccccatccgcaccgtctcgctcttcactcttcctttgtctctttcccaccacttagtttacaccccctccgccctcctccccgccccccgcgggcacccgagtgtccgggaggcgctcacctgttcgacccaaacatctacgcgacccccagcgcccgccgcccgcgtgcccgcccccgccccgccgccggtcattgtgctccgccagcccacaccgggccgggtcctgacggcgcgcgagccacagttgtaaagtaataggataatctcggggacgtcgctccagcccagacccgggcacgcactgtccgtggagacggcaccgccggggaggggagccacgcggattccagatgcggtcccccaggcggacagacccttgcccggggcgcaggaggaggcaggactggcatcgcggggtgggagccctggacctccgagcaacctcggactcggcccg

SEQ ID NO: 10699 - DNA, 513 bp, Homo sapiens
acgttgccacggcaacgactgcacgcgcattcttggagggtggcttgcggtctcataggcctcgcgcccggggaggagaggaggtggccgaccagaccgtgggctcccgggtctcccggctccctcaggtcctaaatctctcccattagagattctgcctggagcccccatgttagcgttctccttcatcggctctcctccccacgccggcttcagtgcaccacgcggctcggcgagggactgggaacgggatagggacgcgccccaactcactcagcggtggagctggggggcggcgcggtcacgtgggatggcgggcagctcaggggatccgggcgacggggtctggcgggcagggttgttccagccgcctttataaagccggcctccccgacccctcctcctctctgcagctctcccctcctcccttgggggctgggaggggacggggcgggacgctggcagccgggagagtggaaaaggctgcacagagccccgtgacaagcccggccg

SEQ ID NO: 10700 - DNA, 1766 bp, Homo sapiens
gcggatggccggcccaggcgcgctcccctacccggggccgcctgtgctcggtgtgccgtgtccgcgggtcaggggcgcggcgggaagtcctcgcccgcccgccagccagcggggtcaaacaggtcatccctctgcggacggccggcgccggagcctccctcccgcccgcccggacccacctccgcaagcagcgctggggctggagccgggcggtccggaccagccccggctcacctgggcggcgctcgcggccgggctcacgccggggaaggctccggccgccgcgagcccccgcccgagccccgcgtcccccagccacccacctgccccccacgccccactcaccagcgcgcacggccccggcaacctcacccggagcggggcgccgccgccgcctctgccgcagcccggccgggccgctgggcgcaggggactccgcgccgccgctgccgctgccgccgccgccgccgccgctgccgctgctgcatcccccggcgagcgctgctgctcctcctcctgcctcctccccgccccccaacgccgccgccaccgcccccggccccctccccgcgcgccgccccagccaaagtccggctccgcaccccgcccggaccgctcttaaatcgccccagcccggccggccacgctgccccagccagccccttggcacggcgctaccgccccccgctcgcctgcccgccggcctccacgcaggggaggcgggcgcgctccggggcggggagcgtcgggccgggagccgcggacggctggggcccggggcgcggggggcccagccgcggtgccctcctcgagccctccgcgcgctagcgcttttacctccggcctgggggacgcgcggcccgcgacccggccctgcctgtccccggcgcacggccccggccccggccccgaagtccagctccggacggggcagtgaacgcagagctggggtcccggcggctctcgacctcccgatgcctccggactcggctggccgcgctcccggcgccgagcgcgcaccctcgccgggacacacagacgcacactcactcgacacactctcgctcctgctcgccctcggcggagagttgaaacagatgtgggattcgcccaggagctggaaacgagggagggaagcgagccagagccttgtgtgcacgtgtgtgtgcgtaacacacaaaccagggggcatcgctaataaatcaaatatcgtgataaattcaggagggccatcgatcaggtccacttggctggaaacgacgtgaatctgcctcttttccgctttcttcttctcctctctcggagctggagggagccaaatgttccgcggggagtgcgacagccccggccgggcgctcccctcgtaatgacacgttaataaatgttttcttttatctgctttcacaggactcgccccggtctgcaaacactcgactgcctttgccgaaagcctcgcgctcgcctccagccacacacatttgccattggagaggccggcgccggccgcgacccgcagctcaatcgcagggcaaaccgagctgcctgtgcgcgcccgagaactccccgagaaattaacttcggctcaagtgaaaatagcagctgttgtccagaaatggcccgggagtagcatagaaaggagaaaccggcttcctccgaaaggggaggaattggactcaagggggtgctgtctaccgtggtttccgctgtccctcgcgccacagaagaggccggagggggaccggcctgacgcgggtgggcaaagagcg

SEQ ID NO: 10701 - DNA, 6511 bp, Homo sapiens
gcgaccccgggggctagcagagaggagaggctgcgggaggactcgctgcgaagggcgaggggtggcgctgggtgggacgggcgcctggggccgtgcagggtggctcctgggtgctgcccgggctgcctgtcgcccagtactggcgcaggaagacgggtccgcgcagcgtctggcaacagtggcctgctccacgcctggaggcgaccaagttctgagttaaaggcgccgggcttagccgggaagtgtatggcgacccagaacacggagcggagaaggcctcaggggacacgaggctaccgccttagtcctcgggcctgcgctccgagcggttagggtgcgtacggatgggctccgggatgttagtggagaggtgacaggagtctaccatcccacggccaagcgtgtgaggcctccggcgggcgggggtcccccccggggcagggcagggggagagtcaggcatgtctctaacgggctccctagtagaaccgctaggaaagtggccttcaaccctaggcacctttgtggctttcaggtagttgggcgactaaaaattcacttttgcctgctgtgaaatgggacaggtggttgtcaggttagagactgtgcccacgaagtctcgtttggcgggccgggactgacgtggacccgggccctcctcggaagcttgggaacctgtgagcccctcagctcctcgcctcactttgcctgtttgaaaaaaggagttgtttgagaggaagagttaaggctcaaaaggttctaaacgaagagcatgcggcctgacgcggagcgcaaagaagcgagcagtgaactgaatctggtgggactgagaccagaggcgtctgtatgcggcggccgcttcgcgccctattaaagcaatctgttatttacgataatcatttttgtaattattttggagtggctgtgacttgatgtctgtggtgccccagggcatgcccttactggacatagatacttcagggtgccctttgacgccagtgtcggtccagtgggtgccagtgccgcgaagggagggtggcgggcgtgaatgccccctcctcctgggtttgccgcaggccccggcctttccaccttgcttgatcctggcgggtctgccacttactgaggtccctaccggcgctcacgttgtcccgagaggcgggacaaacgtccggcgcgtggcgcggagtctgcgaaagcgctcgggggcctccatcttctgctcgggagtcccctccctggggcgggaagaggagtcgcagatctgcccgaatcttgctctacccgcctggccgccttcttccgtctggggtgggggcaggggtggcggatgactcaggcctggggccgggagccctgtttccaaaggcaccacctcgcgcctctttggaagtggcgcgctgttggggcgctcccgctgttgcagaggcctggtttgcggtttcataggggcgtgggtccagggcttccagggagtaagtgagtttaggctccctagggggcggtagaggggaacccccgacaaccttccatcctcttctccaggcggctgcgaggcctccggggttccagaggggtccccttctgccggtgccggctgtcttgagcgcggccacgcagtccgcgtcttcacgtgggcaaggggcggggacgttggagggaggctgtcttggatgctggagccttcggttcccggctctgctgagcagaaaagttgaagtcaaggaagggttgaggcttcctcacaagggcgcgcgcgtgcctgggtgccggcccagaagccgagaatgtgcgtattggggaagggtctcccgtgccgagaagacagaggatttgttctagctgccttccgtacagagggcgcggaggttgcgctccagttcgaacgcttacccattggaaagagggcagcgccggggtccagggaagctccttgggaatgaatggcctttgccaagcggttccggatcctctgggtcctttgggcccacggcacggtgctgcgcgagccctcagtgcccatcggctcccttcgcctcctgcgtagacgctcccaggcggggaggcatatcggttcctccgggcagctttggctagtgttgctgtgggaaaggagagccagggcctgggatgggggatgagcaccttcttgcccattccgggccccagcgtgcaggaggtaaacttgccagcacagacaagacagcttgttcaagctgcacctcaggccgggtcagagaataaaaccgagggctagaaggcccagaatgtcggacagcccagcggcacccgtcagggagtcccaggcgcccgaaagaggcgccgcacctctggcgagtctaggacccatcttcctggacctgtgctctggagtgcctgcgggcctgggtctaatttctgcttctggcaggtgtccccctcccccgccgctaataccaggagcgctgcttctgcggtaacttattttacccccagaagcctgttttgggaccgaagtgtcagggtcctgtgtgtctttttatgcactgttctccttagtgcaaagccctgcagatatgcttggccgaaaagtctcagtggtttcaacttccagattttgttcccgcgtccggtcggaaaatcacctgggatttggctgctgtctaaggccgggggaaagtttcccttggaggacgcctattattattattttcttttaggcccacctgggtctaaataaatgctaaagttcaaacgaacccgagaaggaacagcgaggcagtggatgccgccattccgtggatgggagagtcatgtctactgcaggtgcggacaccgtactgataggcattgattattgcaaaatcgtattcagtatcaaatagaaatagtcttgtcctctaatccccacagaatgtttaaatccagcccagggagccagttggggcgtcccaacaaatacgccctcgagaattagcgatgttccccttacaatgaaagtcaattgctgcataataactgggccaaagaatttcgttagtttaaattttaaaaattagtattgcactttgctttcaagtttgggtggcaagtaccgaaggggagagggaagcagcgtttgtgtggaaggaagtttcgttttctgtctaaacatgtgggacctgggtgtctacctctccagtcgagagctctctgcaggctctctcccaacttcctgcacctcctcaccctcaccttacccgtggcgctcgggttttattcctgcccggcgcttctttcccagggcgagtagaggcttctgagtgaccggcccgccagaggcagctgcagagccggcgttccgcagggcagggcagggccgggccgctgggctggtccagtgcgcgcgggttccccctggcctcagccagccgcgggagatgccacttcgggcgacagcggcgagacgccgctgtccgcaactcctgggcgggtaggaccgtctgctgcctctgcggcccttggggcagactccccaggagtcccttcctctctcctcccgcccgggggccgggaccgcgctgtgcccacggagggaactgggcgtctctggcgcactggggctccagctgcatgatcccagctcagaccttaagcctcagtggggtgtaggtgggatgggatgtgtttttaggagatgaggagaccccggttgttgagtcgctccccaaatgcgcagtttcttaactccaggtgacatccgtcttttggaggaacgagtgaaggccgtttaggcgaaagaggggtgggtttcagtatttggatcccttcccccagctctgccaatctcaggtgtgtttacggtggaggtgacagaaggaaggcgcgtcgggggacccaggcctcgcaggtcttcggctgtcaacgaggcaccgcccactgactccgcgcttcgtccctcacagcgtggggctcggcgctgcgccaggcccgggtgcggggcggagctaggctgggactggctgggggccgccccgcccggcgcctgggcctccgcgccggcccccggggaggagttatgataatttccttctcattaaggcgctcgggtcccccggctatcgccaggacacactgttcgggcgcggctttccccgtccgcggagcggtcttgacactcgcggcggcagcatctacgctcgcagagccgccgatgcgtgtccagtgacccggacagcaaggcccgcgcgcggcgggggcggcggcagacgcctggtcaccgtgaccccgattttggatttaccgcttgggggctggggggatcctggatttaactggcgactgttttgggggacgccggacgccatgttgtggaaaataaccgataatgtcaagtacgaagaggactgcgaggtgagctggggctccggggtgcagccccgccccgccgaggacagtccgggaggcaggggccactggaccgaggtcggggacgagggcataggagccctggcctctcggtgggacgggatccacttctccggacaccccttagtccatttctgcggggcccctttcctgtatagggccttttcctaaatagcctcccctcgggaacgaggcctggaaagagaatggcaaatcccacccacacagcttaccgggcgctttcctaagcggcaaacagccctgcttcccgttttctcggaaaagtgccccgtctgcaaccctcagacgtggcttttacgcacgaagtctctgtccaaaggggtcagatgaggctacctgctagcgacaccttggcggacactcctccaaggccggcttgtcacctgccccgctacctcctcggggaagcacgaaaacaaccgaagtttggctttcaaaagaagtgggggctggggagtggtggtgggggtgcccgaggccagatggggccgtaagagctcgcgagtgctccagcctgtcggacaggttgagctagagtttcggagagtgggagggaagaaggaggcggcgagcgggaagaggaagaagacgcaggcagcgctaggcgagctcaggggcgccgggagcgcggagctcgggctacggactcgcgggagttcactgcgcctccgggccctggagggctgcccctgcccgcaggcccgggcgcttccgccaggaggcgacagcgccatgttcctccaggttcccggcgccccgagacccctgggcagatggggacgcatcctttagaaactgagtcgggccgcccaggggcgagggaacgtgcgcgggcaaggctgcccaatttccagggttcttcatgccccctctgcgccccgacgtgcgagaacactgcccttggcagtgcagggcgcccccacttattactcccctcggctgggcccggccagcagggagggccgccctgtgcgcgcgctccctcttcacttcccagggcggcgcagggtggcgggccctgctttccgagcgccgcccgctcggaggtctttgtcccgagggcgtggaagggagggtcccgggggcgggggaggtgcgcatttcccgcgccgcgcactctatccgcgcctgccgcgctgccacctccagcagtccctgcgtcatgggcgggctccacgagatagctctgcaccgggcgtccggctccttcgccccgggctctggctccttcgccccgggctccggccacggacttttctggcccaagacccagggttcggacttggcgcctccaagcgcctcgggcttgggagcagcgcctagaccttcgccgccgggctttgagaactcgttcccccaggtctttcaccagactctcctccctccccgcactctttgcttacaacgaaatcctcggggcgcattgcccccgggtaccttccgaccctgggcaagccccgccgggcggggtgcggttggtcccccggggccctctgcgtagcccggcgatgccggccagttcgcagtagcggggtttcgcactaacggggtctcctgtttttttttttccctccaggatcgccacgacgggagcagcaatgggaatccgcgggtcccccacctctcctccgccgggcagcacctctacagccccgcgccacccctctcccacactggagtcgccgaatatcagccgccaccctactttccccctccctaccagcagctggcctactcccagtcggccgacccctactcgcatctgggggaagcgtacgccgccgccatcaaccccctgcaccagccggcgcccacaggcagccagcagcaggcctggcccggccgccagagccaggagggagcggggctgccctcgcaccacgggcgcccggccggcctactgccccacctctccgggctggaggcgggcgcggtgagcgcccgcagggatgcctaccgccgctccgacctgctgctgccccacgcacacgccctggatgccgcgggcctggccgagaacctggggctccacgacatgcctcaccagatggacgaggtgcaggtgagcggcgctgcggctcctgaccggacctgttcaccctacg

SEQ ID NO: 10702 - DNA, 6511 bp, Homo sapiens; identical to SEQ ID NO: 10701

SEQ ID NO: 10703 - DNA, 338 bp, Homo sapiens
ccgccttccgcgcatgcgcccaggccggtccgcaggcctttctcgccccagccggcagccagctcgttcgcgctggggtcaccgcgagccggtccgcagcggggtcaccgcgatccccggcgcagacacagaggccgcccccagccccgccgcctcgtggtcccgcccccgctgcacgctcccttacccctcggacctcgcagggccgcggcggacacggcccgatcggggacgtgaacgcgcagaactacatttcccagcgtcccgctcgcgctggaactacacttcccggggggctcggcggtgcacccgccggggtcgcggattggaggtttccg

SEQ ID NO: 10704 - DNA, 936 bp, Homo sapiens
gcgtcctgcccgctcattgggcctcccgccggctcatttgcatggtccgaggggggcggggctgacgtcgcgctgggaatgccctggccgagacactgaggcagggtagagagcgcttgcgggcgccgggcggagctgctgcggatcaggacccgagccgattcccgatcccgacccagatcctaacccgcgcccccgccccgccgccgccgccatgtacgacgcagagcgcggctggagcttgtccttcgcgggctgcggcttcctgggcttctaccacgtcggggcgacccgctgcctgagcgagcacgccccgcacctcctccgcgacgcgcgcatgttgttcggcgcttcggccggggcgttgcactgcgtcggcgtcctctccggtatcccgctgggtgcgtctggggacgctgcccgggctccacgtgcggagtgggtgccccctaggccggggagcgggggatccccaggggtcgcggggccctggaggagcgggcatcggacgcggacacggcggggtgcatcccgagggccccctccgaggcagatgcttcctgcgggggcgctgttcctgggcccgggaagggggcgttggaaccccgagcggtccgggccgaagcctgggactctcgtgcgtccccacccctacccccatcaggcgcccgtgcatgaagggagaccctcacctccggactgagagtcggagcgtctcggagcgacggggagtagggagcgggacccggggcggagggtagtgctggcccctgcggactccgggtcccctgtgtcctctcgggaggggctggacgggctgagctgccgaggggccgatttgccctgggccggacaaagagtggggctttggccggtcccccacggtgggctccttccctctggggattgagggactcaagacaccccgcgcctgcg

SEQ ID NO: 10705 - DNA, 2184 bp, Homo sapiens
gcgcgttcccttaacccccttgcgttccagctcccccggctccagcaccttcgtgacctgagcaccggcgggctcctgctcactgtccagcacccgacgcacctgtccccgccgcgcagtcccttccccccggcctgagcttccctcccggcgcgcactgcccttgtgaccctttccctccccggccacagatgcagctctcggccagaagctccacttccccgaggccctcgcccctgccaggcagctcccctgcggcgtcgcccacccagagttctccccctggacgctccctcagtgcccccctagcagccccggcggtcttctccccaccttcagccccctccccggtcccccaggaaggggccagactccagctcagcacccagcgcttcctggtctttcccttctgggcgccctcccgacagttccctttagggaagttggcccgctgcgcgctcccacccccggccgccgcctggacagaggcgcgcaatccggagggcgcaggctccggcccggagaagggggtgccgccggcgttccgatttctcaggaatggggaaacagaggcacggtggatccggcggcggggctgggtctggggctggacgttgacctaggaccccgcccctgcccgccctgcgccgcgcccctcccgggccggccttgaccgagcagctccacgcgggcccggggctcgtccacccgacaggagcggggggctgcagcccacgagcccacgagcccgcagcgacgcacccggagtgtaacctcgcagagtcacggagacactttcccggtgtgggcgcctcgccgcgcttcctccccgcgggctgcggccaccccagggcaggacagagccgagatgcccgggtgggagcgatgcccgcgtgggggcgatgcaacgggggagatgcctggggggagggtggtaaggtgaaacctggtggagaacaatgggggtgggtgggcgattcctggggaggtgcccggtgtggggtgtttctggttcgcccggggacagtgcgcgtcccctcgcccgcggcgcccgccctgcccgtcccaccgaggtcccccgggagcgtctgggcccacggcttcggggggtttctccgagacctgggcgctgttctgggggagcaggggcccgggccaccaaggttcgtgcggaccgtggggtgtcccacgcccaggccgggggatcccagagccccgcttccctcaagggcgccgcgccccggactgcaggtggagacggggaccggccccgcggggtcgccgacaggcgcggggcgggacagggtgggaggcggcggggcgcagagtcctccggtcgccggcgcgatccgggcaccttcctggaggcggcgggagcgcggtcgcggcgcctccggggtggggtccaggttggaggctccggggcgcaccgccctagccccaccccggccgggtccccgcgctgcctctgcggagagggaggaaggaaggaaggcagggagggaggggacggccggcaggcgtggggtccgcggcgtcagggctccttcctcccgtccgctccatcctgcaacccgtagcccgggcggggtctcgctgccccctccccgaacacagccgccttttcctccctccccaaccccgagcgcctcccttcccgaatgcgggagtccatagtgcacgggaagcctcttcccctccccaccgaggctgcccgacgccccttccaccctccgaccccccgcaaccatccctcaaatgccccggcggccagcagggctggggtgggcgcaggagaaccaggggtcctgcccgcatgcaggggtttggggtcggtgtggccgaatgaacgcgcgggttcagacgagcctgtgatgcccccgctttccatctcctcgcgacctggccccagaagacagtctgagaggccggtggccgcggatcctggacgcgcttccctcctgcctgtggtttccctttattccggcagcgctgtgagtccacccttcactcataggagccacatccagaaccttctcctggggccacagcgtgggcttccgatacctgtgtgaccccagctctgccccttcagggctgcgtggtgaagccctcaggaccctccgcgtgggttgggcgggtgacgtggatgagggacaacgtggtgaggtccccgtcgtggcg

SEQ ID NO: 10706 - DNA, 413 bp, Homo sapiens
ccggggcgtgggagttgcgctcgctctcctttcccggcgtcccgtggagaccgggaggctcagcgcctctcccagctctcagcgccgccctcccagaccccagagacgtcggtcagggcgcggcgccccgggccactgcgggctctttccgggcgggcgacgtggggggcgaggcaccgcgcggcggcgcctggcgggcactgttgcccgcggagggacggtgggggggtttcagcagctggcgggggtggagggggcgggagagggagcctgcgccgggctgagcctggaggtgcggggcgggctcggggagcgctcttggggctcctcctgccacagccggggcggctggaactctctccctttctccctccatccttccacttcccctgctcggccccgccgtcaggccg

SEQ ID NO: 10707 - DNA, 403 bp, Homo sapiens
tcgcttagctcctgcgcccggaagaaaatccagcgcaggtcgggttccggcgcgcggaagccctgcgaaccccaaatgtgtgcgctgagccgaggcctctaagcggtaggagagaatctgacctccgacattcttttcaagacacgcgccggtggaccgggtcctgggattggcttactcccgggctggaccttggggttcgcatatttgaaagcgtaaacttgaggaatgacggcggggtgatgggtattttatagagtgggactcaatcgtgctcagcaacagatttctccaaattcccttttaaaaagagcctcccagagctgtcgaaatctccgcggggtgaaagctaaacttttggagtcgctgtgtagccgggtagaggacacggcggcgcgagccg

SEQ ID NO: 10708 - DNA, 675 bp, Homo sapiens
ccgttcttaaacgcacgactacttccctagctttccagcaccaaatccagcggccccacccggccacgcccccacgccaggccatgacccccatatggctcactgcgcaagctcacacccagtcccaggaagcgagccccacgtcgccccagctctgcattcacagccgccaagcggtcccggaagccgaatgccggataggtcaaagacagcgccgctgctccggcactgccgccagagggcgcggagtcgccgtgttggcctgcacctcccttgtcacgtcagccgaacggctacggcaatggaggattttgccgtatgcgacgacaggatgactgcttcccctgaagcttcaccaaacacggagaggctttcctgtccctgggagacgcggtgatgtgacgcagcggttgcagcgaaggtttcttgtaaaagatggccgctgcggagttgctaggtgtctcctggcaggcggcggccgcaccacaagatggcggcccgccccagggtcccacacgcggggctgcggaggcggcggccccgagggtccccgccccttgctggccctgtccccgcgtgcggggctgcgacctgcctttgtgtgcgggtggaagtgcgggccgccttggggccgagttgcaacttcgcgacactccactggagtgcgatgagacg

SEQ ID NO: 10709 - DNA, 580 bp, Homo sapiens
gcggtggccgaggacgccctttctggcgtccgggggcaccggaccgcggctcgccgggatggaggcaggcaggcagcgtctcgggagggctctagggagcggcccggagctgctcggcggggcgcccagggcgcagcgggcagcgcttaccgagggcgcgcaggtactcctcgaaattctcgttgaccaacatcttccagtacccagtgaagtcgactggcatttcggggagtgactggagccagttggccacaagcgggcgggacggctggagactgccgggacagcggctgccggtgctacgcgggtggtgggcggcccggaaatgagcgccctccggggacagggggctctgcggggcggcgacagctggattcccagcgcgcacaaagcctgcgggaggatccattgtagcggtcgctcctccccgcttagcgagggcgggcgcaggggcgggggatgtcgaagggtcaggtttgtccaggccgcgccaccttcgtttcagacgttcagttcgtttcccctacaaaggaagaggagaccggagacgggacgtttgctttgttggccgaactcttcg

SEQ ID NO: 10710 - DNA, 858 bp, Homo sapiens
tcgggcacgctgagttcaccgagaactccaaggagtcaacgagggcgggtgcccctacacttccccagggaccagcgccgcccgaccgcaattctggggaagaccccggcggtcctggagaggagggacaggcccccactactcacctggccagccccgcggaagggctggtggatgaatgaactgcccccccgccggccgagcctcgcgggacagcggcggaccgcggggtgctcacctgtggggatgctcgagggcttctccgagtccgcacccagacagggattccaggggtggaggacgagcgccaggagcagcagctgaggcttcaccgtgcatccccccatattcggccctcgagggccgcgcgggctcaggcgcccacggccccgcagcgccgcgcttctcgcgagaacgcagagacccgggtccgccctgagccgccgattgcgggcgggagccggcgggcaaggcgcgcggccggcagccggagcggcgcgtaacgcagctgagtgaggtcgtcggtggaggcacggagcagcaggcgcccggggcgctgcggaggccttataggctccccgaggggaggcgacggggcgggccgcgccctggctattggccgccggctgacccgccgccgctgcgcgcccggtgcggtcgcctcagctcgccctcctgggccccacgtctggactgtttgctcagcgcggacgctatttaaggagctgcctgcggctacgtgtggaggctcacgcagcgcttctggctggaacggggaagcctgcacttagctttgggagtgggtttgggagagggaggaggagccgccgggagtctggcgggagggcggtgttcccg

SEQ ID NO: 10711 - DNA, 5715 bp, Homo sapiens
ccgggacccggccccccgcacccgccgccggtgctgccgacgcccacagcgctgatgagacccccgaggcttcgggtccggccccaggagctcttgtctcccggctgaggaagcggcggcggcggcggctgcggctggggtggcagcccgggctcctccctcacgtcgatggcgatgtagttgagaccattctggaagccggcagaggtctctctgcgcatgggcgatccaccgctcccaggacaaccgaccaagcccccgggctgacccggggtccacggccggccctgcggtgccaaagggggcgccggctgcaactgtcgtggggaggtgggcggctcgtcgccccctccagggccgacacccacgccgccctcgctgcttttcctgagagagacattttccacggaggccgagttgtggcgcttggggttgtgggcgaaggacggggacacgggggtgaccgtcgtggtggaggagaaggtctcggaactgtggcggcggcggcccccctgcgggtctgcgcggatgaccttggcgccgcggtgggggtccgggggctggctggcctgcaggaaggcctcgactcccgacacctgctccatgaggctcagcctcttcacgcccgacgtcgggctggccacgcgggcagcttctggcttcgggggggccgcgataggttgcggcggggtggcggccacaccaaaagccatctcggtgtagtcaccattgtccccggtgtccgaggacaacgatgaggcggcgcccgggccctgggcggtggcaacggccgaggcggggggcaggcggtacagctcccccggggccggcggcggtggcggcggctgcagagacgacgacggggacgcggacggacgcgggggcaacggcggatacggggaggaggcctcgggggacaggaggccgtccaaggagcccacggggtggccgctcggggcgcccggcttaggagacttgggggagctgaagtcgaggttcatgtagtcggagagcggagaccgctgccggctgtcgctgctggtgcccggggtgcctgagcccagcgacgaggccgggctgctggcggacaagagcgaggaggacgaggccgccgacgccagcaggggaggcgcgggcggcgacaggcgggccccgggctcgccaaagtcgatgttgatgtactcgccggggctcttgggctccggtggcagtgggtactcgtgcatgctgggcaggctgggcagcccctccagggacaggcgcgtgggcctcaccgcccggccgcgctggcccaagaagccctccgggcggccgccgctaggccgcacgggcgaaggcactacagggtgagggggctgcgtggggccggccccgaaggcgctggccgcctggctgggccctggcgtggcctgaggctccagacgctcctcctccaggatgcgccccacgggggagctcatgagcacgtactggtcgctgtccccgccacaggtgtagggggccttgtaggagcggggcaaggagctgtagcagcagccgggaacgcccctgagcggctccccgccggggtgcagggctgcggagaagaagtcgggcggggtgcccgtggtgaccgcgtcgctgggggacacgttgaggtagtccccgttgggcagcagcttgccatctgcatgctccatggacagcttggaaccgcaccacatgcgcatgtacccactgtcctcgggggagctctcggcgggcgagctggccttgtagccgcccccgctcgccgggaatgtcctgcccgccgcagaggtgggtgctggccccgcaggccccgcagaaggcacggcggcggcggcggcggcggcggccctgggctgcaagatctgcttgggggcggacacgctggcggggctcatgggcatgtagtcgtcgctcctgcagctgccgctcccactgcccgcgagggccgcgccgggcgtcatgggcatgtagccgtcgtctgcccccaggttgctgctggagctcctgtgggagccgatctcgatgtctccgtagtcctctgggtaggggtggtaggccaccttgggagaggacgcggggcaggacgggcagaggcggcccgcgctgcccgagaaggtggcccgcatcagggtgtattcatccagcgaggcagaggagggctggggcaccggccgctgccgggctggcgtggtcagggagtaggtcctcttgcgcagccctcggtccaggtcctgggccgcgtcccccgagacccggcggtaggagcggccacagtggctcaggggcctgtccatggtcatgtacccgtagaactcaccgccgccgccgccgtctcgggccgggggcgtctccgcgatggactcgggcgtgttgcttcggtggctgcagaaggcgcgcaggtcgcctgggctggagccgtactcgtccagggacatgaagccggggtcgctgggggagcccgaggcggaggcgctgccgctggagggccgctggccggggccgtggtgcagcggatgcggcagaggcgggtgcgggccgggcggcggcgggtaggagcccgagccgtggccgctgctggacgacagggagccggggctggtggcggcgggcggcgagtgcgccacgggcatggacatggagcggctgtgttgcagcgcgccccctgccggcagcagcgccaccttgctcccgcggccgccgcagccgccgctcagggtgtgcgagcggctcaggggcgcgcgcaccggcccggggctcagggggctcccagccaccgacaccggcctggcgcccgcggccgccgctcccgccgccgcgccgccgtcgccctcgctggcggtgcgcacccggcacgagctgcacttggccgccggcggggtggcggccaggctgtcggtgcgcgagcggcgcaccaggcccgtctggctggggggcaggttgaccaggtggtggtggcggcgcgcgccggggacgctgatggggtgcgtggccgacgaccccgacgattggctcttactgcgcggccggaactcgaagagctccttgagcgccttcatggcctccaggatggtctcgtggatgttctgcgccaccaccgagtcgtccgcctgcatccacagctcgccggggcctgtgacggccgagcggcccacctcgatgaagaagaagctgtccgagtggccgcagcggcggatgttcatgagctgcagcgtcaccgacggctgctcgcagttgagcttcacgaagccgatggtgcgcgcagacaggcacagacggtacacccccgtcaggttcttgctctggcccagacccttgggcttcaggttcacctgccacacctcacggtaggcggccgtggcgggagccaccagcccgtagctgtcctcggccccggcggcgccggcagagccgcccagggcgccgggcagggaggcgctgcaggacgcggcgggcgcggcggcggggggcgcgtctccggcggccgcgcggccctcgctgaccaggtcggtgagcgcgcggtaccagccctcctgctcctgctcgttctcggcggccacggcgaagtactcgtccttggtgtagagggcgatcaggtacttgtgcttggcgtcggcgcgcttgttgatgttcaggcagcagtcgagagcgatcacccgtttcggcgcgcctgccttgctccgccactttttctcgctctcgtagtactcgagccgcggcggttgcggcgccgaccccccgcccgccgtcgcctcgtcgccgcccgcgccgggtccgcgcagcacgaagaagcgcttgtggccatgcttctgcttgcgcaggtagccgcacttgcgcacgctgtggttgttgttgttgttgttgttgttgaggttggggccgtctccgctcgccggcccgggcggcccgtgccgcggcgggctcgccatcgcgggcgcttcaggccgcgcggcccgggcccggcgcccaggggttggggcgaggggcggagggggcgcgggcgggggcggctccctcccacccttgcgcccggccgcccgcccgatcacgcgtccctcgggcccaggcggtggggaaggtccggggaggcccgcgggggccagcaccgctcggcggcgccgcgccctccgcgctctggggctcctgaggatgcccggcgcgggcggtggccgcccccctccccggctgcctgcggccgctgcctcctcgggctctcgggcggcgccgggggacgcgctcgctgggccgggagtcggggtccccgagccgcggggccgagcctaaggcgcgcgcggccgcaccggggctgctgccgccgcgtcgcgctccgggaagccggggtgcgcccgggcgctcggggtccgcgccgccgccggggctgctgctgctgctggtgttgctgctgctgctgccaacggcgacccgggctcgtcgcggtccccgccgcacagtgagtaacacatcgcgcaccgagtgactgaactaagaagagcaaaacaacatgtgactcggcgttacgcaggcacacacagcgcggccgccccgccccgctgcctcgcattggcgccgcgccccccgacggacggcgcgctcggccaatcggcgcggcgctcgcgggggcgggccgcgcgcccccgccccgcccccctttctccccgggccgcgtttcccgccgtcccctccccctcccgcgaaggccccggcccggccgggcggggtggggcggccccggcctcattaatcagcggcttgttgtggatgccggcggaggagatgccacccagggcgggaaaaggggcgcggaagaggggcggggcgggccacggcgcgcagggcccttccctcccgcctcggactcaattaattgggcttgagcttccgccggggagggggcgccgggcggggccgcggctgggcggggcgggggatcgggatcggcggcgggggctgcggccttgcagtggaagcatgggcggcgagccgggccgtgctctcggggcgcggggtccccattttgggcgagggcggccgctcccgcgctcggggtgggcgcgccccatccccgtcccccgtttcccgtccccgtctcccggccgcatctccgtccccccgcagccgcgaaacgcggggaggttccagggcccgcggccgcgggttcgcgagcaccgcgctccagatcgagagcggcgcgcgcccttccgtggaggacagaggggcgcggagggggcgcctgtgtcccacccgctcgcgggcgctttacggggcgtcctctgcgccattcacttgtcagcttgtcgggaagttgaaatcgcgtttgggaggtaataggagaaagagatcggggacggcaggcggagaaagtgcggtttccatagcgccggggagagggcggacccgcgagccagcggtccctgagccgggagaccgcgcgggcgtctctccagcccccgcaggagcgccgccttccttccgcaggggcgtcctctccccccaccgctgcaggagcacccccttccttcctcggaagcgtcctctcaccacaccgcttcaagagcccccccttccttccacaggggcgtcctttccccctccgaggcaggagcgccccttttccccccacaggagcgccctccccaccccaggagcgccctgcgcccagcagacgggcaggtgggcgggcgtccactacctgtgtgcgcggtgcgggcg

SEQ ID NO: 10712 - DNA, 858 bp, Homo sapiens; identical to SEQ ID NO: 10710

SEQ ID NO: 10713 - DNA, 247 bp, Homo sapiens
ccggaaccttcggggaggattaacgccggcgcaccgtgcggccggggcggggcgccgcccaaactcaggccctgtgacagcgactgtggcggtctggaaagcgtgggcctcggtcattgggcacgagcggtcacgtgacagcgggttcctccaggccagcgctggtggttgagtgatgtaatcacgtggggtctgaagtcttcgtgggtgtaggtttcttcgttatgctgacgacaggcagtgcccg

SEQ ID NO: 10714 - DNA, 224 bp, Homo sapiens
acgcccgcccctcttccgggcagccccttccacccaggcgggatctgggtccccgctggactcagggccgccttcccgcaggcggggccggcccggcgcgcaccttgtctcggatgccctggcgcacggcctcgcgctccgcctccatcttggcgtacttggccttgcgctcctcctccgcctggcgcagcgcctcctgccgctcctcctccttcttggcggcg

SEQ ID NO: 10715 - DNA, 1174 bp, Homo sapiens
gcggcgaaccaaagagcagggaatcacaaaagacggccggcggcgagcaggctggggtgacggggaccccgtggataacgggcttgaggacgcccagggcttcagccttttccaggcgtccctcgccggggcaacgcagagcagctgccgttcttcccgcgccccagcagatggtggtgtcagcccggcctcgtgcccggccgccgctgcgcccgcgccccctcccctcgcagatggcttaatcagggctcccgcccgcccctccgcggcccccgccccgcgcgtctgggcgagcgctgcgaacgtggagccaggcagtcaagtgttactgcgtacagcaggtagcctggcaactgagagcacaataccgagcagatggtgttcgcacggcgtgatggacatcacacacgacagcctgagacaatccaggaattccctggtgactcgaggccctctttgcacaaaatgagttctctctccattgccgtgtatctctggggttatctgcccccctcctccgactgacactgaactggtttctcattaccgacttttcttccagccggaggggaggaagaattcaagtgggggagggcgcgggaaggggacgtggagggaaacggaagggctgggagtggggtaggggggcagtggcgacctccggggggggagggtggcggacaccagaccccagggccgacagcccgggagggaccgggttccaggaccccagctgcacaaagccggcccggggagggggcgataaggagcgagcctcgggtcggcccggcaccgctgcttcggctcagagtccttgcaatcgcttggcctacgaacaacctaaatgaaatttagggttttattgaaaaagtcccctggggcctaatttagcctctcgactccagcctatatgcttacaagtcctcaggggactccggctaggaagtcaggagtggggcccgtgcgtccccggcaggacctagactgcctctcggcgcaggcggccctaacaaagaagcccacgaggcggtcccgggcgcgggcaggggcggtgcggcggcgctcgggagacccgcgaggggccctggaggtcctcggcccgcgcgcgccgctcgggagcccgcgaggctgcggtgtgctccagcgggcgcatttcccaggccccgccacatcg

SEQ ID NO: 10716 - DNA, 8657 bp, Homo sapiens
ccggaccctccctcgggtctcccgggcgctccgcctccccggggctggctctccctcccctcccgggcgccgccggccgcgggccgcctacctttcttgggctcgtagccgccgcccggggaccggtagtgggactcgagcgggtgcgcgcccgccttgcccgcgtcgctggccgcctttggcgcggtgtgcagggcctcgccgggggccgcggccgcagagttgtaccgcaggagaccctggccctgcagcgccgcgttcaagttcccgtagtttgtgtagttgccgtagaagggcgacgtgtagtagagggggcggcccagcagcggcgaggcagggtagggcgagcctcctggcggtgccccggttgaggccggcgcggcggccgcgggcagccccggtggcccgcagcccgggcccaggctcggctgcttgaggtccgacgtggcgatctcggccagcgaccacagcttgggcttgctggcggggggcggcgcgcccggagacgtccggctgccctggggcgtcttgcggccaccgcggggcgcggcctcgggcggggggctcagcagcggcgcctccaagccggtaagcggcgacgaggtcacgggcttgggcggcgccaggccccgctcgccctcctcgtcgtcgtcctcgtcgtcctccaggtcgtcatacttgtccttgcactccgagcccgattcgcacagggggtccccggcgcggcacggaagcttctccccgtccgactcggccgagcacgagtgatccgtgagcgagtccacgtgcaggctgatccctgtgggggcgcgggcacggtgggtggcacgaggggacagcgcaggcacctggagccccctccgccccctgtcctgcggcactgggccctccccacgggacccctcacctcgcccccacccggccacgtgacaggcggagcctgacctccccgggaagggcccgaggaatcgctcgctcaaatcccggcgaccccagggcaatgtggtgcggctggggctccggcccggacctggggtgtccggcgggcaacgtcctccccgccttagctctgcgccccgcctgggaagaaagcgccccgagaccttgcgccggccgctgcccgctcaccttcgtcctctgccgaggtctccgtgccctcctgcgccttgtcgggactctcgtccttgcttctggtagcgtcgccctcgtcctcgtcctcatcttcgcttttgtttctcggggcccaggtcatcttgttctccttcttgaggcgccggcgcgcgttggcgaaccaggtggagacctgggtgagggtcatcttggtgatgatggctagcatgatcttctcgcccttggtggggtaggggttcttgcggtgctcgttgagccaggccttgagagtggccgtggcgtcccgcgtggcgttcttgcggtacgcggggtcgttgagctggtacgggtaggccgcgctgccgtacgggtggtagctgatggcgccggtcatgccggtggtgtgcgcgtcgtagggtgcgccctggaaccaacaagagcctgtgagtggagtatgcggagaccccgcgggcaaccagccagaggatgccacccctccgcccgcccacggccaccgttccccccgtgagtctggctctggggctgcgcttcccgccgcaaaagagcaggaaaaacgcagtgtgattcgggaccagctgttgatcacaaaaagtaccggagttttattctcgaatttctgaactatttcactttcctaaaatgacccatcttcccctaagtgttccggagccgctcgtggcaatgtacacaaacccttgcacgtgcgcgcacacaggcccacaggtagctctttgatatctaaatttctgcagatgcttggagtgcggctgcctccccctactccctcttcccctcccttatatggttaaaaaaacaccccagagcccccaattcactattcactgctctaaagctgggcaaatccaatttgcaactcagaagccagtcaccgtttcgaattcttcaaatacgccgtaattagcattttaattcatcctttaacgtttaaattcgaggcatttgcagccttcgccaaggccccagcgactcggtcgctgcccagaaattccgccgagggccggcagtcgcgacaaccccgtaatggcctcaatcgcccgtaacgtgcttcgccgcggcccgggcctggcccagctcagtaacctcgagactcgcgagccgcccccaggtcgccggagcaggagctgcgctcgggccacggaggactcaggcggcccttagcgggtcacgcgcccgcaagcacgatatttgaaagcatggtccgctggacagagtaaggccgaaacctgggcgcctcgggccggactccggagccgcagctgaatgctcggctcctgggcctaactcggtgacccccaccgccctgagccccgcgagtgaatgcgaaccgcccggccgtcggctcagaggccgcagtgacgcggaccctcgcgccccacgccaatgcaggcgagcacacagcccgctccgaacgcctccccaggctgcggtgcggaaaccagggacaaacggcgccagaccccggccccggcggagacgcacttcccaggctctcagagaaaatcagccggcgagccgaggggacgcgcggggggcgcgcgggtcccggccgggctcagggacgtccccgcctgccgcgctgccctccccacccggggcccggctcagcctgcggggcggccaaccgagccggcgactcctgagtcgccagccgcgccacattcccggcggcccccgcccgccgaacccgagccccgctccgcctgagccccgtctgggtcccggcgcccaggagtcccgcgtcccgcccgcgcccggttaccatgtaggacgggaagccggcggcggcggcggcggcgtcggccgagtactgcagcgggctcccgaagccggtggccgcctgcgccgtgaaggccgccgagcccgggtaggggctgaacgccgagcccgacgccgagcgcgccagctcctcgctgcgcggagccgccaaagccgacgcgccgtaggccgggcacgagtagagcgccagcgagccgggcgcctggtacaggtagccctgcgggtaggacatggtgggcgcggggcgcggggcccgcgtcacgccgagcagcgggcagggcgcgcggcgccctccatccacgcccggccggggcgcggcgcggcggcgggcacccggacggccggcggaggcaggccggcccgggtactagcctgggcggcccgcgggccggggcggcggcggggtggcggtggcggcggcagcagcgcggagccggtgggcgcagccgcgcgccaggccggcggtcggggtttgggggagtctggagtcgggagtgaggagttgaggaaggagcgctcgagtttccgagggacattggaacgcgcagctgtccatcacgcgctcatctgcatattcgggggcccgcccctcccctgctccgcccgctgcagcctccgggccgcggccgggggaggggcagagagacgggagggaggcgggggagggcggaggcgacggaggcgggcggcgggagggaccggcaggcttttgtggcgcagccgcctctctagcagctccggccccagcccgcggctcgcggacctgcagcccagcccggccgcgctgcgtgccccggcgcgcacccctcccactcccatccactcggagccacgtcccctgcccggctccggccggctcccaccgtccccggccaccgtcttcgcccctgcccggcccccgccccttccagccactaccccgcccccacccccttctccaccctcacggactaggcagaggccgcccgcggtcaggccaggccgggtccaattaggggactcacagcctgccccgctgtgcaccccgaggaggcccggcccctgtgtccaatccggaagtcgcagggaagtggggaggtcaggatggtggcgcccgcggctcgggtcttcctccgggcagtgcgcgcggctctcacttccacggtcccggacctgctctgcctcctggcccgaggctccccgcgtggcctcgcgtctggtcgcctacccctcgcggtccactccgcccagcatggacctggatccggggcgccttggttgcgaattgccaggagggccctgaggtgagctttctgcccccaaatccgcagcgcaacccccggggccctgaacgttacgactttccactgttgggaatgacgccagggcttcagctaagaagacgccgtcccctaaagagttttattttattttgtttttctaagttgactcctctttcagatttgtgttgtcaaaacactggggggatgattgttacctgacaaaccgcctctggcaggacctgaagcctcccagtcacgtcgagaacgggcaggagctcaggttggcgccgccggtgcagtgggcattacaggtagctcaggtgacgcgcggctggagtaggggggcggttgccttgcggggctcagaagcgaggcggttggcgagggttcctaggaccccagcttcctagaaccctctccccatcacgcttctccaacccttttccactcggggatggccgaagagggcgtctggctgcccactccgaagggtcacctatggggggcgctcagggggatggaagagtgtcaggtctgtgctggcctattgggagcacccacccagcaggtgcctctatcctcggaagccgtctcgggtgggtgcggtggagaagagagagcgcagtggcctggggcgggcctcagctcaggcctgcagccgactcctgcacccctgctggccctgcagcctgcggagcagccttagtgatctcaggacgcagggcatgttgcggcctccctgtggtgcggctgcagcggcgcggagggagcggagcccgggttgccagtctggtccagggcgcaagagaaacactcacggcatcaggctgtctttccccaggtgcaagggaaccagttgcaaactgcagtgctgtgcttgaggatggctcctcctgagccggcaggctcccggtaggcgcggtccaggcacgttacccctcccgccaggagctcccgagccgagccactcgccccctaccagttatcccacccaccccttcgcccacactgctcccccaccactcttcctacaaaccacacccccatcctgcacacatcctcttcaggccatctcaacacacgcacacgcacacacacccacgaccacctctccctccacccacagacaccccgttcccacaggctgggccccctgcaacgacccagcggggggtttcaaccttgttgcgactccacatgggacatcctaattcagtccaggacagatatttttaatcaattactatagagctgaaaaacagagagagagagaaagcagccgggttgggcaagccgtcgacagtctgcgacatttttgcgcttcctgggagggaattcctccaagaagaggggtaaatgagaggcccacacgctggatggcaaacacaaacactgtcagatcagatggcaacctttagggttcctttacgatcagatcagtttaaatgaaaaaaaaatcgggtgtaatttttatcaccagggagcactggcctggagtatttccatttctaaagagcggttcccgctgtggtttcattagcatttggggctcatcctccctccccctcccttgacccacccccctccccccgccggacctctgccaggggcagaagagaaaacagccagttattatacaaacatcctcagtttggagctggagtgtctgctctggatacagtcgattctgacatcaattaaatatataaccagacacgtgcagtggcggggagggtcccctcacccagggtgcatctccagaaacgccgcctgcccttccccctctttagctcagtgttgggagtttgaagatggcctcttcccgtcctgtgtgtattttccccttagcaattatactcctccactgaaatctatatgttccataccgctgctgcctgttactaataaaaaccgtctaccttgcactattaaacagtcgactcttactacatgccgtttttattggtagtgactgtagcaaattaaaatgcctacgcagggacattaaaaacttaacactcgtcattgttattgaaatatataaactacgttttgctttaaagctctctgatattaaagaaaaaaatcacattccttcttcttaagttaaagttggcttggtcttcttcttaaaaaaaaaaaaaatcaatcatgagaaaacatgctgccagcgtggagtcttggcgcggcggtcccggcgaggctgcctgagagggtggcgggctcagcccagactccgtctcggggccacgagggctgcaaggccgcggctcccgaagaggagggcctgggatgttttgctcaagggcgaggcggggtgctcaggcctgtggggtcgctggggagagcccggcacttggcttctgaggcttttcagttgccgtccgagcaggagggagggaatgagcaggcacgcagggaaaacccagtaactgctttgcaaacgcgacccctggtcacaataacccaggcgatgggggcagtttcaggttcctggtgggccctgccccctttcctaggtgtgccctaggaggtggggaaaaaattaacactgtttctatttttctttattgtccctgcaacagccaaagaatttagaacgagtctacgtggacacgcaagtttcagcgagcggggatttcctgcgaggccgagcgcgaggaacagccggccccggaggctcgggctcggggtctccccggggacgcggccgactgagaaggccggggcgctcgccgggcgcggcgccgtcctccgtgtcgcggggacggaaggaggcgacgcaggccaggagtcgtgcgcgcgggcggcgagggggcgctgtggcccgtgtctgccggcccgagtcccggcaacggtgggcgcgacccacctcctcccccggcggcttaattcggggaagaagaaaaaacggcatcgaggcatttcaataaaacctaagcgactcctgatcctttctcattgtggttccttatgagctttcggtgtctggcggggaaacagttaccgttcgggggtgtggcaaacttttttggcaattaagatgaaacagacgcttttatgtgggtttcctttaatgaagtaacattggaaatgtaagtagtttcagtgcatcaaatcacatcgctaccgtattcgcggtcaccggccctcccgttccagggctccccgcgtttgtcgagggagagagcgaggcaggaacagggggccggggacatgagaagtttggctaagaaatttttcttttctttgaaaacaaaagcgttgttataaatggaacaaaatttaagtcaacatggaacccacatctctttcaaacgtcgtttctaggtctagtactctgtgagtaggttggactggatttcacgctcaaccggcatttctaggctctcaaagacgcttccgaggcctaaatgttttcctggaaaacacgtgcagaggagcatccgtggaagactgaaaggtccccgcagctccagtcctggcaggatgtgcaaggcctctcgaggttttcaaatgggcccccgaggcctgggagatccccgagtagccacgcgggcgccacttcagggacgcggggcggcggctactgtgggccgggagggcccccgcacgggctgctctgagcgcctggacccgggaccctgcgcgcgctcttttctttttctttcgtttctttctttcttatttataatttacattctagggacctcgtattcagctaaccagctcttgcttacttaactgccctgttttcagctccggatttctgggaggtctccccatggctaacttgtccctcccggcatcctttagcgctctgcaaaatttgccttcctcccacagatgccccgcctccgacgtgcttcctgaagtttctctcccgctcagggtgcccacaatcctgaattctccagcatctcgccgactccgtctctaccctcctctccttcctaatctcgcgctggcttcgcccttttctctctcctcctccttcctacgcgccccgccccctccccccaggtcgcacctctccccgcccgggtcgggagcccctcgtggccaggcgtccgcgcggctcaagaccgaggtccgccacgctgggccgctcgtgggcggctctcacccggcataccgtggaaacggcgcgtcccgccagctgcggctccagcctgggagggagcgcagcgcggggagcctgcagcgtctggagagtgaggaaaagggacattccttggaaatggacagagccgagttccttaaagggatcgcagttgaaagagaccctcttcaaaatcagcaacgacctggcagccttagttcctcaacaggagatggttcgaagatgaaatgtttgaaactccgccgccgtttcacctttgcacacacgcgcacggcaggcccagatccgcacagagacgcagacacgcgcgcgctcgcgcttcccggagaggtcggcgcgtctcg

SEQ ID NO: 10717 - DNA, 1059 bp, Homo sapiens
tcggtctgctaccgtcccccagggaacgagacactgctgagctggaagacttcgcgggccacaggcacagccttcctgctgctggcggcgctgctggggctgcctggcaacggcttcgtggtgtggagcttggcgggctggcggcctgcacgggggcgaccgctggcggccacgcttgtgctgcacctggcgctggccgacggcgcggtgctgctgctcacgccgctctttgtggccttcctgacccggcaggcctggccgctgggccaggcgggctgcaaggcggtgtactacgtgtgcgcgctcagcatgtacgccagcgtgctgctcaccggcctgctcagcctgcagcgctgcctcgcagtcacccgccccttcctggcgcctcggctgcgcagcccggccctggcccgccgcctgctgctggcggtctggctggccgccctgttgctcgccgtcccggccgccgtctaccgccacctgtggagggaccgcgtatgccagctgtgccacccgtcgccggtccacgccgccgcccacctgagcctggagactctgaccgctttcgtgcttcctttcgggctgatgctcggctgctacagcgtgacgctggcacggctgcggggcgcccgctggggctccgggcggcacggggcgcgggtgggccggctggtgagcgccatcgtgcttgccttcggcttgctctgggccccctaccacgcagtcaaccttctgcaggcggtcgcagcgctggctccaccggaaggggccttggcgaagctgggcggagccggccaggcggcgcgagcgggaactacggccttggccttcttcagttctagcgtcaacccggtgctctacgtcttcaccgctggagatctgctgccccgggcaggtccccgtttcctcacgcggctcttcgaaggctctggggaggcccgagggggcggccgctctagggaagggaccatggagctccgaactacccctcagctgaaagtggtggggcagggccgcggcaatggagacccggggggtgggatggagaaggacggtccg

SEQ ID NO: 10718 - DNA, 1663 bp, Homo sapiens
ccgcctcccggcccccgccccccgctccccgggtggtgaacgcctgaagagggaggcgtggtcccgcgcaccttgtctccggccgcgccaccggcactcacctggctgctgccgtgctcctcgcccgtctccggggcccgagactccgcgggactccgcgccggctctgcgggaggaggcggcggctccagcagctgctccaggcaggcggtgcccggcagagaggagctcttctggtggcacaagtgcgccccggggccctgacgccgtgcaccctcatctcgggcgcggtcccccctcgggggaggctggggcgaggaggacagggaggatgaggcggaggaagaggaaggagctgagtcgggggagcgtccgccaggaggcgtccctcccgctgctcccgaggccgccgcgggcccctttacggcggggagcaaatgctcgcggatccggcggcgtagcgtggacccctgctcggctctgccggcgccgccgggctccaggggctccggcgacgagcagcacaggttgggctgcgaggaggagaagactcggtccagcacttgcttccgcttcttgaagccgctccacctgctgcctgcaccactccccctggccggtgcattccctgtgcccaccgggggtggcggggagggcgacggggtgtccgcagtgcggcgctctggacccccagcgcgcccgcccccgccgcccttgctcctgcccacccccagctgcaggttcttccagagccgggcctggaaggaggaggacgccgccggcggctctggctcgcccgccgcggcagcccggggctccatcctccaccccctgctcctcctctcccctcctcctcctcctcctcctcctgcttctcctccctcttcggctgcacctcctcccgggtccccgcggcgctggcggtggcggcggcggcggcggcgggcgcagcagcagaaaccgggagtgcccagcgacttcaggccagctcgggggaaagaagcggccgccgccgccgaggctctctggcctcgggactccggcgctgcctcttcctcccgcacctgctggggtgggctggagccgtaaccgaatcccggccgcggcgcctgcaaagtttttccctcgaagctccgcggctccagtccactggcgtcccccaggccgcgccctggctccctcttctctctgaccgagctcgggaagctgcacgcaccggggcgtgcgcgtccagctgcgccagggaccgcacccggcgccctctgggcagcacctgtcagcggcgggggcggctgcctccaaattgggcgcgcacgcggctcacacaacaaggcgcgtctggctggagactccggggaccagcagtccccctggggcgccccgggaccatcctccagctcctaggtgggagggccggtaggagccgggtggagctaggtagggcccgaagccagcttgctccctaggatccggccacagttgcccaggcagctcgctgtgcgctggccgctggccgcgctggcgatcgtctgggtcggatgaagcgagctggagtggaaactatgtgccctcgatgggtctcgtgggggcgccgatcgtccacactgagcgatgaacccgacggagttctaaagctgaagacgtctgcccccgccccgttgcg

SEQ ID NO: 10719 - DNA, 2065 bp, Homo sapiens
gcggaccgcggcgtccctagggaacacacccacctagcaaccgagaccagagctggagcgctgcgcctttaattctggggcgggcggggggcggcgggaatttctgctccggttccctctgcatcgcgggggcagctgtcacctgtaaggcgagcgcggcgcgggggatggaagcaggcgcccattggacagaatacaaaggcagaaacctaccccgaaggccggggcccggcggggcgctgggggtgggcgctccccgcggcccccggcgcccttcgccccgagacgccccggcccagcggcactggcgcgaccgaggtccagcttcggggacacgcccggctggccgcggggaaggcaccaggtgagcgcggccgcgcctcccggaaccccgctcccgcgcgtcccgcggcgacgcggcgcccacccgccccgggagccaggaacccagggccccaccatggcgctggccgccgccgccgccgctgcggctgccggggtgagccaggcggcggtgctgggcttcctgcaggagcacggcgggaaggtgcgcaactccgagctgctgagccgcttcaagccgctgctcgatgccggcgacccgcggggccgcgccgcccgcagggaccgcttcaagcagttcgtcaacaacgtggcggtggtgaaggagctcgacggcgtcaagttcgtggtgctgaggaagaagccccggcccccggagcccgagcccgcacccttcggccccccgggggcagcggcccagccgtcgaaacccacttcgacggtcttgccgcggagcgcctctgccccgggagctccgcccttggtccgggtgccgcggccagtggagccgccaggggacctgggtctgccaacagagccacaggacaccccgggggggccggcctccgagcccgctcagccgcccggggagcggtccgccgacccaccgcttccagcccttgagctagcccaggccaccgagagaccctccgcagacgcggccccaccgcctagggccccttctgaggcggcatcgccctgctctgatccgccagacgcggagcccgggcccggggcagcgaaagggccgccgcagcagaagccctgtatgctgccggtgcgctgcgtcccggcccccgccacgctccgcctccgggcggaggagcccggcctgcgccggcagctgtcggaggagccgagcccgcggagctcccctctgctgctgaggcggctctcggtggaagagtccggtctgggcctcggcctgggcccgggccgctccccgcacctgaggcgcctgtcgcgcgccggcccgcgtctgctgagccctgacgccgaggagttgcccgccgcgccgccgccgtccgcggtgcccctggagccgtccgagcacgagtggctcgtgcggactgccgggggccgctggacccaccagctgcacgggctgctgctgcgcgaccgcggcttggcggccaagcgcgacttcatgtctggcttcacggccctgcattgggccgccaagagcggcgacggcgagatggcgctgcagctggtggaggtcgcgcggcgcagtggcgcaccagtcgacgtgaacgcacgctcccacggcggctacacgccgctgcacctggctgcactgcacggccacgaggacgctgccgtgctgctggtggtgcgtctgggtgcccaggtgcacgtgcgtgatcacagcgggcgtcgcgcctaccagtacctgcggcccggctcctcgtacgcgctgcgccgccttcttggcgatccaggcctgcgaggcaccacggagccagatgcgaccggtggtggaagtggcagtcttgctgccaggcgccccgtacaggtggccgccaccatcctcagttccaccaccagtgcatttctgggcgtcctggctgacgacctcatgctccaggacctggcccgaggcttgaagaagtcgagctccttcagcaagttcttgagcgcctcgcccatggctccacgtaaaaagacaaagatccgcggtggtctgccagccttctcagaaatctctcgtcgacctactccg

SEQ ID NO: 10720 - DNA, 3487 bp, Homo sapiens
tcgagagaaggtgagctcggcgggcgcagcgggttgggtgggtgtggcccgcggctccgggaacagacccaaggccccgccaccgccggctagcagcccgacagcccgcccgcctggcgagcgcaggctcttcttccagaaactgcgaggatccgagcgtactgtttgtgcaccacaaggtcaagtcgggaagtggagccggaggaggaggggcgaggaggcgaagggtggggagaggggcgccccgcttcctcgccatgtgccagcctttggaagttacccctcggtttttaacctttcggggtaatgggaaggaagagcaaggaggaaggggtcgccccggggcaaaatcctgctggggccaggatgtgcaaccacccacccacccgctcatcactgccttctccaccccccggaaatgcggggcagcgctaggcgccaggaggcacccgggaggggggagggggcgacgagcccaatggggaccctctctacggaccgcccctcttttcttgaggtcgcctacaatttcaagttcccccgcccggaatgttagttttccatttggagtgggtgcggggaggagggccgcgccccctccccaagactcgcgttcgcccctccactcccctcctgccagcactttctgctcacttctggtgctgcaaaacgccacgcaatttattcgattcgcattttaaaaccagcgattcagaagcagggcctagggcgagggtcttccagcgctggagccccggggggcggggtgctcagtgcaaacctcgttccctccgcgagtgtcgcctccaggctgttatttgcaaagaaacgtctttttgacgcagggagaaatggcaaattttaagtacgtcattaatatggcgccaaaagatttttttaagtataagctcgcttttttttttttttaaggttgcggggggcgccgcccgggtctggggcgcgtagggggcggggtgtgagcagaaagtgtgagtgaaagagtggaggggcggggtatgtgtgtgagtgtgtgaagtgtgagcagacctgatgggacttgcacgggcgcagccgccgctcgggcccggccctggggacagggcgggctaggggcgccccagagtccatggggagtccgggcccagggtgccagcaggcgtggtggtggggctgcgagggagggcacccttcccccacggggcccgcaacgctacctggactccccgccggagccaaacaactgggcggggggttgggggggcggcgacgggggtgtcgggagcggagatccgagtgaataagaaaaaagtggctactccccctccctcgctcctcctgcccgcccccaccccacccccaccccaacacattttttttttctaaagagatcacaaggaagtcttggtttaaaaagaaacagaaacatacacagggggttggtgaatggtgccgaccgcggccatcgcagttggaggctattttttggggggggtgagtagcgtccatggagttactttgcgcccactcctagcggcaccggcttaggtcctgcgggccgaccgtccccggcggggggcgtggggcctgggacgccgcgggcccggccgcctccctcgccgcgaccccggatggatgcgcgccccccgccctcccgcgccggccccaggagctcccggcttcgggagcatccttcccgcgccggtccctgcagcggcgcgtagccgagggcagcgcccgtcaggggggcaccgcggagcaaggtaagatccagcccccggcggatgggccctgcgcatctccacgacgttatttggcgtttttgcaacagatctgccagcgctcttcgctccctcgctctctcttgctcgctcgctccctctctctcctgctggctgcctgttctaggaagccagcgcggagaggggggggatgcacagcacaggggagagagattgcgcatgttggtcagtcgtgttttaaagagtacagtgcggggaggctgagaggggcgcatgcaacaacaacttttggaagggtgagcttggcgaccttctttattaatgactgcggcaaagcgcccccgggccggcgagggggcgcgggcgggcgggggcgcgccagggctgcaacttccccgcgggctccggccgggcgtaggggctgcggcgggagatgggtacggtggggaggtcgagcggcccgggcgggggctccgagaacctggagctatctgccctcctgtctccccgagtttcattttgttgatacgcagcacgtccgggcgccgaaccgggctgagccggtgcacatgacctcgcgctgggctcacgtgcagccggtccggtcccagacaccttccgggggccaccgcctccgccctgtcgccccctctcccggcccggtgcacgcgggcgctgcacgcgggggcagcatgctcggctcctggggttggaggctctgcacaaattagacagtttttttggaggggcgggggacaccctttccaggtgagtgtggagggtgcggagcctcggcgccaggggtgaggactggggtcgggggcagcctccacctccggggccgcgcggtagtccagctggggagaggcgctgggagagtggaaatgtaccggcggcggccggagcggcgggtgcgcgcccgcggggcgacggcagggggcgtggcccttgtttaccttctcccaactctgccggttcgcgtcccgcttcagggacggatccgcagtccccagccctctgcctagggccctgcaccatgggtggtaccaggaagatgccggcttgtggcggaccccgtttgggacgcacacacctgactctcaaatgagtgacattgcagcccccgcccccacctagcgctgctgcagtccctttgccggatccccggccccgccccgcccccggcagtggcatcttcccggcctcacctccttcctccctctccctcccttcttcccacccactcgcctgcgcctgcggagcggcgcccgcccgcctcctccccgcctgggtgcagacttgtggctccccatggtttcttcccgcccatccctgggtcctgagacatcctctcctctcggccaagggacgagaggggtcaacttggcgattcgcagctgttctgccagaggatggggttgcctgcgagacagccaggaaggcttcactctagcttccagaggcccagccctgtcccctactacacacagctaccaccccacccgcccctggggctcggctgcccttcccggtgtctcttaaacccctcccccgacctgggtgttaagcccacccacctcccggcgccgcccccggtcgaacagcctcttgcccttccttcgcctgggccggagccccccgcagcctcctccggctcctcctcccggctccggcggtcggaatcacgccggcgcgcctccagcctgcggtcccgcggactgcctccaggggcgggctggaggcgcgcg

SEQ ID NO: 10721 - DNA, 847 bp, Homo sapiens
ccgaggggaaaggacggatctggcgcctggggccccctcggtgggacccaggtgggtggcccgcgtggggtggggcaggggtactcacaggcgctcagcgttgcgggggatgccccgaggaaccgcgcggaggcccagcccgtggcagtccacgctggcagcggagcaggtacacttggtggggcaggcgacggctggaggcccactcaggacgctcgccagcgccaaggccagcgccaggcgggcgcgcacggcggcgccgacccctgcccacccgggggccatggtgtgcagggccccgctcctggaggaggctgcctctgcggggcaagacgcgtggagcccgaggaggcgcgcggggagcgcgggcggcctggggagcgggcggcggagttagcgcggaggaggggcgagctcggtgctcaggcgcacggggcgcgggcggagcggggcgctccgggcggcggcggcggcagcaacagcagctccatcggcggggccggcgctgccccgctgcgcatcgctgggagtgcccaggtgcggagcgccccctggccccgctggcccgcgggccgggttggggacctggggcgagcgcaatggggcgtggcgcccggggaggtccggcttggggctgggctggggagcgcggcggctgcggctggggcacggggcggccgggtgagctggccggcgctcgctctctccattcagtgagcacggcagacaccggagacgcggggcccacccctccggcccccccccgaccaagaaacgccaactccgcctcccattggctgcgccgcgcgtcatgtcgactaagttgggaactttgctggagcgaccg

SEQ ID NO: 10722 - DNA, 909 bp, Homo sapiens
ccgttcagtatagacggggtactcccggtgcggcctgtcaccgctctgtctggcgctggcgctcctagagaaggccatgccgacctctcccccacctcgctccagattccccttcttgagctgcttttcccacagtccccccaggcgccactgagagcctcccgtcttcgatgggcttggggcgcctggacccttccggggtcactttgccgtcttcctccagcccccctccctactccttgtcgccgcccccccgtcttttcaggaccttgcgcactcaggctggccctatgctttggggtaccccagcagtgcccccgggtctccggccacccggtgacggagggagggagaggctggcgagggggcggcgccttaggtcccagcgcgacccgcctctcagcccctcccgccggctacagccgcgcgggacggggcagggacctcgagaacaccggggacttgcgggccggtggccccgggcaggccacttctgacgcgggtgcgaggccttccgcgggcgtgcacggttgggccggagccgcgccgggggccgggacacgcctggggtcagcgctggcgtcgccgctcgggtggggtgggccgggttcgggtccagtctcctccccacgggcggcccgcgccccgtcttccagtgacccccacatcccttgcgccccgagctggaacttcggcaggttctgccccgggccgcgcgcgctttctggggaccagggctgtggttcctgctccgcgtcgtgcctttagacaccgccgggcgttcgtcctccatccctccccccttttccccactccgcggttgacgagggccgcccccaagtggccatgtcccccggcatggacgacccctcagtgcccctgagggcccagggtctcgcccccgtcccg

SEQ ID NO: 10723 - DNA, 2150 bp, Homo sapiens
acgccgcgtctcgccgcccgcgggcccgccgggagactgcgggtccgtctcgcgggtggggcgccccggtccctctcgtttcctggaggccacaggtcacggcgacggcggtgaccgggagagcaggctgcgaggcgcgcctcatcgggccacagacaaaccaccccggcagcggccgcgccggaacttccctcaagttaccaaactcgcctacgcgcgggagagtgctggggatgccccatgcgcccgcgaccccagaagccaggagtgtgccaccccttcacacactcactcccggccctgcacgcttcccctcacggtccgagttcctgcaaatgcttggccagaccgaggtcgccgagatgctcgctccagtctctcccctcgtgggcacctagggtagcccgtgagcgccgcccgccgccgtctccagcggcgccgggctcccgaacacccgccgggtgagcgaagcacagcggggccacggagcgcctcgacgcggggacggggagggcagtgtccccttcataaaccagtctcctgggtgaagcttctggggcttggagactggagtgtagggtgtgtgtgtgtgtgtgtgtgtgtgtgtgttgcaccttgacttcatggaggatctgtgggagaggaggtgcaaggtttccctctcagaagcctggcgcccttaggtcttagctacgcgggacgctttccgacaacccgatctttcgctaggagagattcgatccaggtctgcgccgcgaggcccccagctcgcctcttcctgcgaccctaaacttgggctttgattccccgccggtcgcggtggtccgggccacccggcggcggctgacagctgagcgcaaaggcgccgcggccaaggtcctcgcggagcagcccgggatgcgcacgccgagggttaaggaggaggccgcccggcctggagctgggatcgcaggctgggggccgggacacccgggcctcgccgggccgggggcagggccgcgggtctgacagctgctgcggctcgcgcggacgcgcgcctcctgcagcccgccctccccatgcctgacttattactctctgctcctcctccctctgctgttccaaaacacccttcgacgccagcaaaatacaatgcgcctcggccgccgtaaacagccgggagggagagcacacattcggcgcggcgcggccgccggctcggctcccacccccttcccgttcctagaaaatgccataaaagcgggcagggcgcggggagggcggctgcgcgcccggcggccggggctcccttcccgcgccgtttccccacgcctccccgcccgccccgcgcgcccgctccccccgcaaacttgccccgccaccccgcccagcggcggggcccggggcccggggcccgggactcacctcgccggagaactttgcgtccttttccgcctcctcttccccgcgtcttcccggctcgcagccccctcccggcagccggcgaggtgggcagttcgtgggtcaccgaaagctcgcggaggggacgcgcatcacatggcagctcgttcccagccccccgagtgcgccgggaagggggaggggaaggggcgaggggaggccggggggaaagcgagagcggggcggcggcgggagtgggcaggcggggtggcgagggcggcggccgctcacgttagcgctgtgcgaccgcagcccgggcgtgcacggccgctgctgccgctgctgctgctgctgctgctgctgaggcggcggcggctcggcgctgtttgctccgcgccgcgcggcttgcgctctccccggaacgcccacactctcaatcgctacattgttgacattcggcgctgacgtcacccgctccccattcacaataactttacgggagccgggcagcgcacctccccggccgctggggcgcggtacgcccggcgactagcgtaagccgctccgcgaatggcgctccgggggctggggcggggggcgggggacgggggcgggcgcgcgcgctccgctggctcgcgggagggggcgcgcctcatgccgccgcagcagcagatctccccgctttgtgcggccgcgcggcccggagagccccctcctcccggcccggctgaccgccccgctcggcctggccttcccggccacgaaagacg

SEQ ID NO: 10724 - DNA, 506 bp, Homo sapiens
gcgcccgctgtccccgagctccgggcctgagtgctggctggcggagacccacagtgggtgccccgctcccggacgatgcccctgggcttccagatccagagcctcgggacgaaactgtttcaggaagacccggaaggactcgccggtcgcggcaagggacaggcggttcctgagacaggaggagccaggaaatgcggggcctggtggggtgaggagcacggggttcctccttcatcctcgcggggactttgccaccggctcagtgtggaggcctcaccgtcccgcccggatccgtggggctccgacagtgtggcccctgcgaggaccccccccatcctcctcgccctggggctgctgcgggagggcgcccgggcagcactaggtcctgagtgtccagggtccggcaggggcttcccgttgtcgcctccctgaccccgccgcttgcggtccagggctgctggtttctccgctggtctgggaggccctagcatggacgtcgtgaggcg

SEQ ID NO: 10725 - DNA, 1503 bp, Homo sapiens
ccgagtgggacgaactccccgccagctctgggcctccccacctgccggcccgcggtcggcgccggcacaggcggagggcgtcttccttcccctgcggccccaagccaagtggaagacttttctctaagtttccctctccgaagccccgcgggcctcccgcgccccagccccagccacagcctgtggaggcggcaccccgaggttgggcgcccgtgcggcgccttggccccagcaccccccgccccgaggcccggccccgggggcgcggccgcccgggcctccgtgtgccccagggggctccgggccgcgagccgctgccgaatggcttttgacaaaaaaacccttgaccaccaaggccagcctcttcctgaaagccccgctcgctccgatacaggaagtagaagggagcgagagccccagagcgcggcggcagcggcggcctggcccttccagagggccagagccagggacatgcgggcgcccgggactccgcgttccgcgcggcccggcgcctgagcgcctccgttccccgtcccggagctgccggcggcatgatccgacacgccggggcgcccgcgcgcggggaccccacggggtaagtccgggcggccgccccctcctccctcgcgatccccacggcccgcgtcctggccgccccactccacttcttgtcccagagagtccttcgggcgcgtgacctcggggttgtcgggctgatacgggacccccaccgtggccgaggccagaacctggttctgcggggcagggggcggccctggtgactccgctggacccgatgttggctaaactttcaaggccaggcatttcactgggaacccagtgcacactttaggctgctggtggacggattacgagggagtgcgtcgctacctgtcagcgccggggctgcccgcgtggacgcggccccctccctggcgtctgccccgcctgaactttgcaaacaaaactcgcggtcccagccccgccagcctgctgcacccgctgctctgcgagtcgcagcgcgcgccctcgggtactagagccccgctgggcgtggggtcggagacccggacccccgcaactttgggtgcccgcggcccaacagctgaccggccctcctggaccgagggtccactgggcccttttcccgccgcccctctgccctggccgtagacggtgaccttcggaccggccctggtcgagcctagtgcttgggtagggtccagggcgcacgggctgcgcgcgggctgtggatgcatgacgccgaatggtttgggaactgacttggagaggagtccccggtggctaagtccccgctccgcctccttgtcgcccccagccccacctcgcgagctcgggcattgctcggggctgggctctgggagaaagtcctctcgccttgcccagctcagagggcgtcctgagaagcttcaggtgttgtagagacgcccggtcggaggcggattcccggggaaagcctatttctgggtacccaggagcgcg

SEQ ID NO: 10726 - DNA, 907 bp, Homo sapiens
tcggaccggcacagggggacggccagacgggatgtcggaagccaagggacgcagaggccggcgggtggcggcgatggagaggacagatccggctcccagaggaggtcgtgagcgcggggcctgcgccggccggaggagggacccggggggctgcaatatggctgctcgggcgccgtcccctccctgccaagccagggctctggggagctgctgccgcttcccgctcgggctggggcgaggaaaggaggggacggcgctgcggcttcggaatctgtactgcgactttggcagagtaaacgctgcacttgcagcttcgaattgaatttcctgcctctcccccctcccttccctggccacgctcttccctcctcccctcactattttaccttaattggctctaaacgagggtgaaagttgagtctgaggatgccgctgccatagaaactgcatagcaaccaagggctggggaggcggggggggggggcggcaggtctttcccccccacccccagcacgcgcacacccttccccacctccccagcccgccgcgcctccccggagacccacaccgccacctcccgccgcagaacgggagggacaggaacacggacggagggaccgggacgaggggagggctccacgcagcacagctgctttcctgcggagcgttcaggagactcgggcacctctggaagcgctgcggactgagctgcccgcggctgcccccgccccgagggccgggacagcacctcaggagaagagggacgaagagggacgacagacaaatagctggggagaggcgggggggggcggcccgtggggtccgctgggccctacccagccctgcccggagctgcccgaaacagcactcaggcctctgcgggccaggatgaaaggcacgtgggccg

SEQ ID NO: 10727 - DNA, 1925 bp, Homo sapiens
ccgtcggccccaagcaggaaggcgcccccggcacaccagcccctctcagcgcccccagcgggcccggcgcctggagggttaaggcgggcgcgtcccgcgggtgggcggggggggggggacgggaccggtgccgggagctccgctgccctggcgtcccctgggtccaggcccagtcgctccttgggcctctctcgcggggccgcctccgcctcctccttgccgagacgggcgtggggcacggggtcgccgcccggcggggagctcatccggcggcgcagacgccccgcggctccggggagggacttggcctgggccccggccccgcgctcctctggggaggagccgagaggctgcagctggcggcggcggccccgggcgggagggggtcccaggaagcggccaggccggagccccccactcggccgcagctgctggcctggccagaaccgagcgcgccctcccggtctccgccgcttccctctgcaaaccgcgggcaggaggagccctctccttagcgggcccggagctcagaggcgtcgcggggcgcggccgaggggaggaggaaggagagcgggagcgcagccggcccgggcccagccgtgactcgtggggcggcggctccgccaatctgtgggcgctgacgcggggggcggctccgcggcgctcgatatctgcccgcccgggacgcggggcgccgagaggctcggccaggcgggagctgcgctcggggcggccgctgcacctgcccgggaccccgccggccgctccccgcgcccaccccttccgcccttcgccccccccttccccccagccccggtctcccgggcgcggcgtgagagcagagcccggcccggaggagccgccccttccccgcccgcccgcccggcgcctggagaggagcgcgctgaggatcgggacgcctgcggccgccgccaccgcccaggcccgtcgcgccccggccgggatggacccacacgcccgatgagccccgcgccggcggctgcgagcgccgagcctccccctgctgcggccccagccgccccccgcgcgcccggctccgcggaccaggacccctgggctccccggctgagggcgcggccgctccggagaggccgagcggggacgggcccgagatggcgcggggacccagcgctccggcggcgggcgccctgcacgcggcccgggcccggggacagccccggagctggtagccgcccggcaccgatggaccttgacccgcgaggcggcgccgcgctcgtgcccagctgcagctagaggggcgcgcgggcagaacgcgctccaggcccgggccggcccgcgcggccatgaagatgatgctggtgcgccggttccgcgtgctcatcctgatggtgttcctggtggcctgcgcgctgcacatcgccctggacctgctgcccaggctggagcgacgcggcgcgcggccctcgggggagcccggctgttcgtgcgcgcagcccgccgccgaggtggccgcgcccggctgggcccaggttcggggccgccccggggagcccccggccgcctcctccgccgccggcgacgcgggctggcccaacaagcacacgctccgcatcctgcaggacttcagctccgacccctcctccaacctctcgtcccactcgctggagaaactgccgcccgcggccgagccggccgagcgcgccttgcgggggcgggatcccggcgccctaagaccccacgaccccgcgcaccggccgctgctgcgagaccccggcccgcgtcggtccgagtcgccccccggccccggcggagacgcctccctcctggccaggctgttcgagcacccgctttaccgggtggcggttccgccgctcacggaggaggacgtcctgttcaatgtgaacagcgacaccaggctcagccccaaagcggcggagaacccg

SEQ ID NO: 10728 - DNA, 1287 bp, Homo sapiens
ccgtggctcggaagtggaccctgtccgacgcgggggtggtcgctggagggccgaggatgcctacacaggcccctggagggtgtgccttcggagtctgtctcgccctctggacccatgggggaccagcaacgccgtcacaccctcctctgtctctgccagccgctcccccgctcccttctcctggctgaggctggcaaaggcaggcaggcatgggggggcggggcctcaggagggaggaggggctggtgggcggggcctacggacacctcgccccgcccccagtggggctccgcactccccacaccccgcggtccccctaggtcagggcctctcaccaccgcgcccagaggccgggccagccgggcgtgcatcccaggggcgctccgtcccccgcggcctgggactctccagtcaggacagtacaaaatctctttatcgctcattttctgtaaaaaatcgtggctctcggcggaccctggagataggaggtgcaaagggcgctcacacgcggcccgggtccgcggccgagagctggggggatctggagcggggccgggtcgcaagaagaccctgaccctgctccggcgctggggcgcgtgctaagggcccgcggggtatcagctgtattttcgaacccctgtgcttggccggggagttcccaaggctccactccgccttggagggggctgcggaagcccggaggtgacccgggctctgggaggggcgtccccaacgtgggggaagggagacaggggccttcgaagacagcgcgagactcggagggggtccccccgacctaagacgtggtaaactgaggccggcgaggagcgaggctgagtccggggaccaggcggcccctcactgctcctccggcccgtcgcccccctgcgcctgttcgtacgggcagggccggcggccgagtccagcgggctcggggccaggcctgggccccgggggcggcgcctcctcctccgcgccgtccccatgctcgccctccgcgtcgctctcgtccgagttgtcctcctccaagtagccgtcaccgcgcaccttgtgctggggccgcgggatgcggggctggcgcggggccacgccccgccgcagcttctgctccatccgcaggtaggagaccgcggccaccaccagcgtcaccagcagcaccgccagcttagcctgggcgtaaggagagggatgccagggacccgcggccgcctcgccccgcaccttctccgcctatacccctcgctgagataggcccttccctcctccgggagcctcccgggccacgcg

SEQ ID NO: 10729 - DNA, 2906 bp, Homo sapiens; identical to SEQ ID NO: 5279

SEQ ID NO: 10730 - DNA, 2146 bp, Homo sapiens
tcgcgtgccaggaaaagctgtgaggctggaaaccccggagtaaggctcgaccttggccagacctgcaggctgcggaaccgggggcgcgcgggcgcagcgcagcacagcccggccatggagcacgcggtggccccctgcgtcctctacccagggactgagcccggggctgccggggagagcgagagcgagggcgccgcgtccccggcgcagacaccctgcagtctcggcgcgtccctgtgcttcagctccggggaagagtccccgccgcagtccctcgcctcagcggcggaaggcgcggccacctccccgccctccagcggtggcccgcgggtggtggagcggcagtgggaggccggcagcgcgggcgccgcgtccccggaggagctcgcgtcccctgaggagcgcgcgtgcccggaagagcccgcggcgccgtcccccgaaccgcgcgtttggcttgaggaccccgcgtcccccgaggagcccggggagcccgcgcccgtacccccggggttcggggcggtgtacggggagccggacctggtgctggaggtgtcggggcgccggctgcgcgcgcacaaggcggtgctggcggcgcgcagcgactacttccgcgcgcgcgcgtcgcgggacgtgctgcgggtgcagggagtgagcctgacggcgctgcggctgctcctcgccgacgcctacagcgggcgcatggcgggcgtgcggcccgacaacgtggccgaggtggtggccggcgcgcgccgcctgcagctgcccggcgccgcgcagcgcgccaccgacgccgtggggccgcagctgagcctggccaactgctacgaggtcctgagcgcggccaagcggcagcggctgaacgagctgcgcgacgccgcctactgcttcatgagcgaccactatctggaggtgctgcgcgagcccgccgtgttcggccgcctgtcgggcgcagagcgggacctgctgctgcgccgccgcctgcgcgccggccgcgcccacctcttggccgcggcgctcgggccggcgggggagcgcgcgggcagccggcctcagagcccctcgggggacgcggacgcgcgcggggacgcggccgtctactgcttccacgcggcggccggagagtggcgcgagctgacgcggctgcccgagggcgcgccggcgcggggctgcggcctgtgcgtcctctacaactacctcttcgtggcgggcggcgtggcgcccgcgggccccgacggccgcgcgcgcccgtccgaccaggtcttctgctacaacccggccacggacagctggagcgccgtgaggcccctgcgccaggcgcgctcgcagctgcggctgctggccctggacggtcacctctacgccgtgggcggcgagtgcctgctcagcgtggagcgctacgacccgcgcgccgaccgctgggcccccgtggcgccgctgccccggggcgccttcgccgtggcgcatgaggccaccacctgccacggcgagatctacgtgtccgggggctccctcttctatcgcctgctcaagtatgacccgcggcgcgacgagtggcaggagtgcccgtgcagcagcagccgcgagcgctcggccgacatggtggctctcgacggcttcatctaccgcttcgatctgagcggcagccgcggcgaggcgcaggcggcggggccgagcggggtcagcgtgtcccgataccactgcctggccaagcagtggagcccgtgcgtcgcgcccctgcgcctccccggcggccccacgggcctgcagcccttccgctgcgccgccctggacggcgccatctactgcgtgagccgcgcgggcacctggcgcttccagcctgcccgggaaggcgaggccggcggcgacgcaggccagggcggcggcttcgaggcgctgggcgcccccttggacgtccggggtgtgctcatcccgttcgctctcagcctgcctgagaagccgccccgaggggagcagggcgccccgtaggccggcggggtcggcgggcgtctccctcggcaggggtttgcggggcccaggtccctttgggcccgcggaggaggacgtggtggggagtcggggccgctggccacgctggtggtttggacacttcgaaggagccccgaggacgctctcagggccgctttcg

SEQ ID NO: 10731 - DNA, 865 bp, Homo sapiens
gcgccctgcgtttcttccccacgtcacttgccagggagccgctaaacagcaagaccgcgcgctctgcggctccagagtgcggatttcggtcgcgtgcggctctgaccgcgtcgccccatccctggcggggccacgcacggacgccatggctggcgccgcggagccgggcgatgcgcgcggactctcccggggccctgactgtccctgagtcctccctgcggggggcgtgcgcggcccgccccccgcggcgccacgcggcccctcctcggccggggattggtgcgccgggcggggcggggcggggcgggataaaggcgcggggtctggctgcgcggggtctgcgggcagctccaactctgggttcgtagtttgcgctgggtgcgcaggaaggtcagtgtgggggtcgcccgacatttcccccccgcggaggtgggagccgagccacatcttggagtggggactggccgcggagcgggttgcccagggccggccgaggtcggggcgagccctgcgcggcgctggagactctgcattcccgggcgcgcgcagggtccccggccgtggtcgcagagtcaggaggggcggctccggagcccggcgcggggagggcccaggcgcagtcggggttggcagggcgcgacactcgctcccctccacttttgaaagggcttcccacgccgagaagaggggcgggcatggccggcccggcgaaaccggtttgtacagactttgggaagccatcgcctgcggagggtgggaccccacagcttgtccacctgcccaggctgagacctcgtgtcctagtcctggatgccccacgggtttctcgtcccgggcagcggcgcacgggaggagaagactcccg

SEQ ID NO: 10732 - DNA, 865 bp, Homo sapiens; identical to SEQ ID NO: 10731

SEQ ID NO: 10733 - DNA, 1463 bp, Homo sapiens
tcggggggccgcgggacgctcaggaagcgaagcggggaaggctccgggcgcgtcgcaggacccgcgctggagatgggtttgaagccctgtcctgaaaaagccggcccggagtgggctgtccccggtgtccctcgagttctcatgctgtcattcaagcagcagaggaagaaccgggtctggctcgggaagggtgggcttagggccaggggtgcaaatccctcggtaaaagccggcaaactaaaagtcgcacacatcccaggtcccggtccaggccccggcggggcagggtccccgaagtcccggggcgcgcagacgccggggcccccgggggccaagggaacggcgggacccgacctccctgccctcggcctcccgggccctcgccctccgaccagccgctgagtcgggggctggggtcgccgcttccgcccgcggcccgctgcccctccccggcgcgcgccatccggccgccggcccctcctcccgcggggggctccgtcccgcgccccgtccctccgggctgcagccggcagcccacgtccagggagggcggagggaggaggagaggcgcggagaggagggaggggagaggggagggaggaaggcgagagaaagggagctgcttccatcccggacttcccagagcctgcctggagcgcgtactcagcggctctcgggtcccagcgtcccagccgcggcccgcgctcctccgccccgctcctcctcctcctcttcctcctcctcctcctctctaggcacccccgtcccctccttccagcggctgcagcccccagccccaactctccgcgcttactcctgggacgcgcgtcctcgccccatcctttgcttccttccttccttccttcttccttcctcccctggctcccgccctccctctccaggtcgccctcccggggcccgattgtctcggtgccccgctcccggcccgcgccctgccccgtctctcccttgcacttcctgagtcgcccgccgccgccgtcgcagactcgccgcgggagccccagcccaacccgagcccgacagccactgccccggctccagctccagccccacagcccgcggcgcccgcccgagggagccccggcgcccggggaaggctccagtgggctagcgcgccctcgcccagccccgcgccccagccctgcccggcccggcgaggaaggaccgggaagatgaacaacggcggcaaagccgagaaggagaacaccccgagcgaggccaaccttcaggaggaggaggtactgggcggctcggtgtggtggcgggggcgacgcgggacccagtgcgggcggccggcggggcgcgggcccggggcgcggcggtggaagaaggttcaggcatggcccgtgccccggacgcagccccacagtgtggcccggggagggtggatctcgggagcgtgtgtttttgtgtccacgcgcgtctgcgggccccaaattgcg

SEQ ID NO: 10734 - DNA, 1437 bp, Homo sapiens
tcgcaggaaccgaggagccggccggcccaggcctccaaggtcacggggagggggtcagggcggaaaaggcagtggagtgagggtgccgccctcgggccgtgctaatcccgctccgctccgtgccgccgaggcggggtcctggccacgcaggaggtgcgcctcggaggagggcggcgagcggctacggggtggggagcaaggggcgcgcgggcggcaggcatggaacggacgcggcgcatctcgcccaccgcgggacgcccggacggcggccggcgcgcgcggcccgcctcgagcccgagagggcggggagacaatgcctgtccggcggggcagtccaggccgcacgctcccgcccgcggacacgggccgctcctacccgggcgagagggcagcggcgggaaggcgccgggagcgatggccaccccggccccgcgaggcgcggcaggccccgctcgccctctcccgcgcccgcctggcgtgcgcttcacccggcaagtcccggggccacagacccacctcctcctccagggcgccgccggagcccgcgccggagccggtgccggtgctgccgccgtgctcgccgtccggcttcaggttgctcatggtgcgggggagggggcggcgggaaggaacgcgagggcgagcgcggcgccggccccgcgggaagtgggaaggggcgcggggagcggtgcgctcgcgggtgcggagcgggtggcgggggacccacggggcagtgagaggggcagcctccgcgtcgggccagggtcacatcaagtttggcgggtgcggaaggtggggagggggtgcggcgggggaggcagtgggagccggaggggccgccgcctccgccttttcactgcgaccggcgagtgcgccgcggcggcggcggcggcggcagcggcggcggggggcgggcgccgggggagggggcgggcgccggcggcggggggcggggccggaaccggcctcagctggggcccggccagccccctcccccgcccgccgcgcggtctccgggggaacgcgcagccaatccccaccgcccaccgtgggctcgccccggccccggccgcggggcgccggcctccggccgggcctttcccctctctctcgcctgggtcagcgctctccctctctcctcttcccccgcgcccttctccacggcgagtttttaaactttgatgaactcgcccggcgaactttcttaaaggggccgcgcgctgcgcgccccagcccgcgggaggtggagccccgtgccccgcacccagcgccccggtccctgggcggccctgcccgggcggcctcgcgcttagggcacccgcagcgaggtttccgggccgtcgactccccttgtatcttgatctagggttttggggttcccgacgcactcattctgcccctaaatccagtcgcgcagacctcagctccgggggaccg

SEQ ID NO: 10735 - DNA, 717 bp, Homo sapiens
gcggcaggggcgggacccggaggcggggcgtttgctcacgtcgtccagtagcggagggaggcgcggtcccagctccgcgctcaggagccgcacaggcgcccggggccgcagcaggagcctcctcagggcgcccagcgctgcacccacgagccgcgcgtcgccttcgcccagtgcgcccaggagcgccggcagcagcgtgctcacgtgccgcacctgctgggactcggggtcagcctcttgcagacctcgccgcgaccgggccaagcccctctccacccctccccttctctcacaccttcctgcgattcagcgcgaggtggcccaggcccagcaggcccaaccagcgcacagtgggttcggggtctccctgccaggtgaggagtcgctccaggatgacctcctcccgcaggagccgtgcggtgggccggctctgcaacagctaggcgaggcacatggggtcagcacgcccgcggtccccgtgcaggccgctgcgattcagggatcaagtccagggtcacccttcaccacccatccgggaagcaggctcacccctgtgaagaaggccatagccgtgagacgctgcgggtcgtccgcgctgcgaagccgagggagcaagtctgcgaagaggcctcgcaggtggtggtcggcatgtgccaccatagcactggggtgggtggaaatgggagctctcgctccgtttggcggcctttctcctcg

SEQ ID NO: 10736 - DNA, 1713 bp, Homo sapiens
gcgctgcagactcgggtttccttctcagtctacgcgcaagccgggttcggcccacacccaccacacccctccggtccccgcccagcgccgctcctcctcccgggcttctccagcaccgactcagcacctatcagcgccgcccccaggcccctggcccagcccatcctcgggcacgtgtgagtgtgtgtttgtgtcagtctgtcagtcccaccggggaccgggctcgcttaccgagagagaagcgctaacttctgctccagcatcatctccagcttctggccctgtttggagatccagtggtccactccgtgcaggcggtagcacgtctccagcatcaacctgaagtccgccacgaactcggtgatgcccccgtactggccgctggcgaacttctcttccatctgcagcagacacatgccctgtccgggctgctgcgggaaggcgcgaccgccccggcccccgctgcgcggcccttccgccacctcctcctccgcggtggcaacgccccccaagggctgcagaaagggggcggtgaggccccggtgcttctcctgcaggaactcgcccaggatgcggtagccctgctgtagctcgtaggtcagctcctgctccttgcagcaaccgcctccgatcaccatcgcctccatctcttcctcctgatcgtccgcgtcctccagcgaggaggcactccttccgtgggccggccctgaggtctgggccgccgctgccacctcctcctcgtcgtcctctccttcggccgccggtggcggccgctcttcctccccagccggctccatcgctcccggcgtcccgggcacactcatgccccggcaggcctaggctgggcggtgtggaacagccgctcgaggtgctgggggacgcgtgagcgcgagccgcttcctcacggctcggccgcggcgcgtagcccccgccacatcgggcctggctctcctcagccgccggctcggctcggtgcgcgcgggggtcttgagctcaccgccggcggggcggggttacatggcgcgcgaggaggggggagagaagaggagagcctaggtgccctcctctcccctcccccccggcggcggcgcgcgcacggccctcgccggcctcacccctccgcaccccgcccgcctgctcttcaccggccaggccctgccgggtcgccgcggcctcggcgccccaccccctcccgggccagcggggggctgggagggggcgaggaggaagggggttctcctctcccctccccggagggggccgcagcggcggctccggctcctcctctccctcacaccccctcccgcccccctctacctgcgggggacacgggcagaaggaggcggtgcacggacggggcccggcgacaactgtcagttagaagccccgctgggcggtgaggggggagaaaggggaggggcagggagagaagggggagggcactcagccccccggctgggaagagctgtggagagaagcaaagaaagaggccctgtcgccatccccggtgcgcatgcgtagtagaacaattcccccctccccccccgccaccatcgtgccccgccccgctacgcaaaaggaagagcttcggctcagctacaggcccagaagcctgctagggttgcgcggaccaatgatgtaatcaatcgtaggccaatcgaacatgttgatggagggggaagcaaggcgcctgcgcagcttaattcgctaccg

SEQ ID NO: 10737 - DNA, 699 bp, Homo sapiens
gcgcgctcggaaagccggcttgggtcctgctaattattctgaaggcaaagtacctgcactctccccgccgaggctggctggcggcgccgcgccggaggggaggaggctcgggaggaggaggagaaagagcagcgggaggactcgggctgggaggggagcgcagggttggggaggccgatgagcggctcccggctcctcggagaagcagccgagacggcaaggaggaggcgaggctctgtcggggcgaggcgctgcccccacgcgctccggccgccggctgcgggcgcggctgggcggggagccgaggcggccgctcccgcactcgctcgctcgctcgctggcgctccctcctcgtctcgctcgcactcacaggcacacaccccacgtctccagcagctgccgctcggcctcacgcactcacctgcatttccttaacgagccacttgatggctgccagcggcgtgggccccgctccggcgggcgggggccggggcggggagaacgcggcgcgggatgctccgagcgcccgctggggagagaagcggcggcggcggcggcgctgcgggcgcgccagatggggcgggaggaggggagacccggcacccaccggcccagagctgcctgacgcggcctgggcggaccccgccgcccgggtgcctaggcacgattccagggatccagggtaaagcggttcgcgcg

SEQ ID NO: 10738 - DNA, 1191 bp, Homo sapiens
tcgacctccaccaagcggatggccaagcgccacccggaagtgtccactggtgggggcgggaaggcaccgtagtccaaggtatccgcgggcagggagcgggccagggcgtgcgcgaggtcgggggtagctgggaacggaggaggaggggcccgctcgaggctccgcctctcaccggctgcggcctcggctacagccagggcccagagggctccgagtcccgggagcggaggccggagtcgggttcctgtagaggctgctcctccttgtccccgctcggacgtggtccccgctgctcgaggtgcagctgcagcagggcccggcggtacatggcttccagcttctcaagtcgggccctcagggccctggggctgcccggctcgtcctctcggccgctgtctctagccctccggttcgtgctggcctcttcagggacccggcgtgcctccgcgggcgtcccgttgccgccttcgccggggagccgcaaagcctgacggaagaggctgcggttctcgcgcttcagccgccggttctcgagccgcagccgggcgttctcctgacgcagccgcgcgttctgccggtcccactcgtcccgcgcacggatggcctccaagtggctcgccgccaggtcggcaaaccgctcctccagctgctgtcgggcgccgtccgcgcggcctcgccagcccacgccgccgccgccgccgctggggctgcccccaccacgagcccggccggagcggcctggccctcggccgtccgcagcaccgtccccgccgcagcaactcccgcgcctagtggcgccaccacgcatgcgccacatcggtcccatcccaaccgcgccgccagccccgtgggctgaggggccgcgcggccaggcgcgggcaagttcggggctggcagggcggccggggtgacgacggaggaggagaggaggtcgcgggcggcggctgctggcttagagccaaaggaggccgggaatttgcccagactgaggcgtgtcctgtctcctgtggtggagctgccccctgggcctgctctctccaggctgcgctgacacacagttcccccggggagtgctttgctgttcagccctccggctgcgcgggaaaaagcgtgtatcctcagctgagttgtgccagggcgcttccgtgcaggcctgggcactgcaggaactagccgtcctcgcccgctccg

SEQ ID NO: 10739 - DNA, 536 bp, Homo sapiens
ccgcctcctacgtgctcgcgggggggggcggggtcggtggactgggcgtgagttaattggctggggggcggggcaccacgggttggctccgcccaggcgctcgcgcggatcccgggtggaatgacgggagggagtcccggcagctcctacctcccagcgatggcgtcgctgtgccgcgcccagtccccagcctgccggccggtactcaccgctacccggagttcgctcagacggtgagatttggggcgggtccgaggcagcggcgggacgctacctgcgaccgggaccatgaggagctgccagacccgtggggccggtaacgagagcagtcgcggcacctgctgagaggaaagagggagcggtccggcgcggctggggcgcggcagaggcttgcccgatcctcggccatgtcactgctctgcgtgcgcggtgagtgcgcggactgaggcggggaggcggggtgtcggcgtagaggtccccgcacccttccagtggacgtccggtgaccgtctcacccaaactttacatcccgtccg

SEQ ID NO: 10740 - DNA, 728 bp, Homo sapiens
ccgggcgtcccacccgccgcccaccgtcccaccccctcaccttttctacccgggttccctaagttcctgacctaggcgtcagacttcctcactatactctcccaccccaggcgacccgccctggccccgggtgtccccagcctgcgcgggccgcttccagtccccggtggatatccgcccccagctcgccgccttctgcccggccctgcgccccctggaactcctgggcttccagctcccgccgctcccagaactgcgcctgcgcaacaatggccacagtggtgagggggtctccccgccgagacttggggatggggcggggcgcagggaagggaaccgtcgcggcagtgcctgcccgggggttgggctggccctaccgggcggggccggctcacttgcctctccctacgcagtgcaactgaccctgcctcctgggctagagatggctctgggtcccgggcgggagtaccgggctctgcagctgcatctgcactggggggctgcaggtcgtccgggctcggagcacactgtggaaggccaccgtttccctgccgaggtgagcgcggagctggccgagaaggggcaaaggagcggggcggagcggggccagagacgtggccctctcctaccctcgtgtccttttcagatccacgtggttcacctcagcaccgcctttgccagagttgacgaggccttggggcgcccgggaggcctggccgtgttggccg

SEQ ID NO: 10741 - DNA, 1431 bp, Homo sapiens
tcggtcggtcctccctcccccaccccctgactccggccgctccacggaccgcagggactgtcctaccgctccccttcacgcaaccatcagagaatcctctcaaaaacacagacccgatgaggagtggcttccccgcctttcccctgtgccgagaagggatcccggtcgccaacaacaaagacgcttcccgctcccctccccccgccggcccgggctcgtccctcccgcgctgcggctcccggcctagcgccccctccccgagccgggctgcggcgtccccaaaccccgaggccgcacgcacctgcacctgagcggcccgggccgaagcgccgggcagaaggggtcgagagagaaccgcagccgacgcgctgtcctccacaaggcgagatccgcgctccgggcgccgtccgactctctccgcctgcagactggcccgacagaggagcggggaccagggctacagcccccggcgccggggcgaagaaggacggcggcgccccaggggccccgctcacgctcccgagtctcgcctcgcgccggccctgctcctccacaagagctcgcgttctgctgactaacggccccggtgcggggcgctggagcggccgccgctgcccgtcggttgctctcgggcctcacgtcccgcgcggccgtggtcgcagccgccgccgccaccgcctccctttctggcactgcagacgccacccagacctagccaggtcttccttctctttaatcctgctttctttgctcctcctcagcctgccaagcgcgaggctcgttccggtagcgggaggaagactggaggggaacggaggggacgagcacaatccccactgagccaggagttggccactgactggaggaaggtgccaaagctgaccccggctccagcctactagcgggcggggggagagacggagcccagccttgcctcacttccaccaatcagaggccgcccggcagggtgggaggcgctctgagctcaaggagaggctgagctcgctcagcaggaggcggggattgcggaaaagaagaaccaataggaacaaaggttccccgcccctttgatttgatggactacacattcgggccaatgggggaattctcatttcgaagaaagtgggacttgttctccgggtttgagaaagaggctgcgcggagccggaggggtcgaggctgcgccgcgtggagtggcttggcttaacagcagggagggcagagcgatgctctttgacctcccagaagagtcacgtgggctgacccagagccggggcggaaaggctgcgtttgtttcttccgggtcattgacagaagcgtcaattcctgggagtagttcgttggttttctttcccctcatccttttgcctgctcccggcgaggggtggctttgatttcggcgatgagctcccagaaaggcaacgtggctcg

SEQ ID NO: 10742 - DNA, 588 bp, Homo sapiens
ccgcagaacaggcgcggagtcaggcccctggatttgccctgttggaaggagggccgcggagacgcaggcgctccgggtcgcccgcgctgcccctgtctgccccgtgcgggagccggggtccctggctccctggctccctggctcccgcggcccgggcgaacccagagcgcacccgtacgccggccccggccggtccctagcgcccgggctccacgggccgcgcccccacgcggcgcctcccagagaccctcctccctccgggtgggcggcgcagcggggcctcggcgccgcgaggaccccccgcgccagaacaaaggaatgtggggagggggcagggaggagctcaggccactgagcagccccagtataactgccgttcggaggcgcttctcggtcccgacccgaggtccccgcccgccactaccagacccgcccccagccccggattctcgcagaccccaccggcccgcaggagggagcggcgcactgggggccgcacggactcgccattggagatcgcgatcggaaggtggcgccacgcggcccctacaggcctgggactcccacccgagctcgcaaagtaggtcg

SEQ ID NO: 10743 - DNA, 1203 bp, Homo sapiens
acgcccaaccctcgagtctgcacggtgcagtaccgtctattttgggtccagggtaacctgggtgcaaacgctcctgcgggcggaccgcggggtgggccccgggcacacaggaggatcagcagcagccggtcggtaggcggagcgctgccagaggcttgggcctcacaacaaccctcacaggaccaaaacaaacggcgagacgggctgcgcgcacaatagcatacccgggcggctagccgagtcgggggtctcggctcgcggctgcgccaagtttcagaaccacctagccccgtgcctgccgcccggggcccggcctcgccccggccggcgctcacctggcggtgccgcccccggaagaccacggcgaaggccccgtgtcccacgagatccctcttgctgtactcgaagtcacccaccacctccatggccgcgcccccggggcacacagcggacgggcgggcggcgcagtgcggcgcaggtatcagcaccgcggctccgcgggcccggagcgcgccagcgtgcggcgggtctggggcagccgcagccccgggcccgggcggactctcatgccgagagaccggagcggaaactggggaagctgccgcgcggagccagggtcagcgaggcccggcccggcccctgccgctcatggcccggcctgccgccggccgctggctgtctggcgaagcggcctcggcgctgccgggccaggggtgccgtcaccgtcactgtgcgcgcccagagccgcacacgcgctctgaggcagtgaggggcccggtactctccatccccagctcgtcgggcctcctcggccctccccgctcggggcgctgctgcgacggcgacggccgccgccctagaacccgcaccgccgcggccccgcgcttccccgcctcgcggcggcgcccaacgccctcgcgcgcgctacccgctcccgcgcgactggctgccctccgcgacgtccgcgcgccttgaaggccgcagcgccagccggctccctccgccggggaaaggagtgcggccagggcttggcgcccgcagctgggcagatcctcggccgctcctgaggcggggacgaagggcgcgacccgctgcggccacagcgggttacgggctgcgggctccgttctgggcctggggagcagattcgagccgaccacgccccgggctccaggccgctgggaggcggacttcagagaagcg

SEQ ID NO: 10744 - DNA, 5370 bp, Homo sapiens; identical to SEQ ID NO: 5329

SEQ ID NO: 10745 - DNA, 1691 bp, Homo sapiens
gcgtgggggagcggggcgggcttggtagggacgctggtcccccgaccgtgggacaggggctgggttgggacgcgggtccccactaggagccgcgggggaggggcagggccggagtccctaccctcgtaggggaggggctggttcgggacgcggctcccccggggcgcaggggcggggccgggtggtacgccgggtcccctcccacggccgtgagggaggggccggcggcgggggcggacccctggcggtcctcctggctggggtccgcgcgctcgcggcagctccccgtggaggtcactgtccgtgccagtccctcccgctgtcccgccctctcccgctgccgccgccgccgccgccgcgcccgcctcagcgcccccactccgcgcttgggagcgaggagccgccagcgcccccgccccgccgccgccgcagcgccctcaggccgccattcgccaccgaaactttccagcgcccgcgctctctccgggactcggcggcggcggggcgggggcggcccgggggcggcgcgcggctgctccggggcgccgggccctcttcggccgccgcacggccgggactcggaggctgccggctggagggaggttcggagcgcggccgggcgcgcggcgccgccacaagttgcgctgctcgcgacgaggtgagtgcgcagggctcggcgggccgggcgcggggtccgcaaacttctgcggggaggcgggtcccgcgctgaccctccagggtccggccggcggctcggggcgcccgaacgctccacccgcccctggaactcctgtaggtgcaggtcgccaactgtccccgcggcgctcggactggggtgcggcgcgctcccaggagcctgaacaataccccgaggtggccgctccccgaagtgccggcgcgccttgcggggagagacggaggtcggcggggggctcctttgttttggggagggggaagtggccggtaagtttagggaagcgctcggcttttcctccggtgcccctttgtctgccgattcaggggcttgctgggcaaacctgcgccaccgcgggctccggggaccggggtggagggcggtggcgggatttccccgctgttggggagaagagccccattcatacccgggacgcgggccggccctcccggacccgggtggaagcgcagcctcgcggagtggggcaagcggcgggcgaggtggcgcgggccccgtgtctgctcagtttctgacgcgcagaaactgtcaaggaagtcgggagccccagtcctccgcccatctccccggcctgagcgcacggctgggctgggggcacccttggcccgtcgagggtctgcagagcgccgcccggggagagcgcagacctgttgctgctcctgggctctgacggggcgggtggggtgggtctcgcagatcctgggccccggccttgctatccagggggaccttccctaacgatgggaccggtgctcggagtggagtatggggagtgcgccttcgggagtcggcgctggccggatatgtgacaactgtgggtcgctggaggcccgcctgcgctgggatagggcctggacttcacgtgcgtcgcctgtgttccgtcagaccggggccggggctcgctccctgcaaggcctcgtgttcccccagccagctgcgttggacgttccacaaaggtagggactgacgtttattctcg

SEQ ID NO: 10746 - DNA, 1223 bp, Homo sapiens
gcgctgtcacggagactccggccgccggagaccccgccgcagcgaggccactgggctccccggtcgcggggcgggagcggcgccgacacggggtgccaggaggacccaccgggcggaggagggggcctgtctacccttccgcattttcctgggtctctctcccgggcggtgacgtgacgtgctgacggcgggcccgtgccggggagctgggccgctttttgtcagctccgagctcggcccctcctccctccctccgcccgccccaccagccggagcccggcccagtgctccagagaaaggccggcctgcagcacccgccaccgtcgccggccgcccgcacgtccgtccggtgagtcccgggtgccgccgcggccgcggggcctagtgcgcgcacagcggcctggtctcggcctggtcggcggcccgcaaggcgccctcccgcgctaggccgggcggcgtggcgcgcggcgccgagcaggccccgaggaggccgcagttaggcccggggaggagcccggctgccccgagcggcggcggaggcgcgctccgtaagcgggcgggggttgggggagggtcgcccggttgtgccggaggcggtcgaggggccccgggtcggctccgcggccgacctggggcaccgcgccggggtgaggcctggcgaggaggcgaaggctgcaggcgtgaggtgaaggccgcaggccggccgggccgattttcgctatgtaaatatcggtgagggggggggagggacgggggacaagatggcggcggctcggcgcctgctgcaggggacgatagagggggttgccgggagggggagccgccatcttggaggcggtgtctggagagaaaattccgctacagcccgtgagggggggtgggagagcgggcggcggcggcagcggcgccggtgacgggccccggaggcccggcgcggcggcgtgtgcgcgcggaggggcgtgctcgctccccgtggcggccattgcccttgccgccatgatgagcgctcgggctccaggcgctcggcggcagcgccaccttcctgccttgcctcccgcagccccgtgactggctgcagtttccgctgcgtttcagctgagctgccgcaggcggccaccgccgccgcccggacgccgggaccgtttcaccctcagcgcccctggccctgcgccttcccccgcgcctgtagccacccgagggcagtcggggcaggtggcattccg

SEQ ID NO: 10747 - DNA, 1103 bp, Homo sapiens
acgccacgcgccgctttgccatcggtgctttctgagtgacgttaaaacgctctggatggtggcactgggattatggatggggcttatttagctccctccggcttgctactaaggggaggggtcgtcggtgggcctttcggcgccgctgcaagccaccgggttccgaagtcggaggccgaaacggcgtgggccccgaagcggggccgcttttcagggagtgcgcaggttagcgaggaccccggtgaggcgagacgccaccctcacttggctgtctttgttgctcccacctccccagccccagccgcctgcagtgattcgtgactcccgcaggcctctaaggaccgctgcgcgagggagggggcccgaggcgcccccggcccgccctcctcccggtcttcggatccgagccggtcctcgggaaagagcctgccaccgcgtccccgcagccaccctctccgcgtgcccggccctctccagtggcgggggcacgtgggcgcgcggggtgcgtggcaagccgcccctctccccacgcccgtccggccgtctcccgcgcgcgcgccccgcacacagcctccgtgcagtgggcagagcccggccccgcgcgcgccccgccccgcccctggctagccgcgcccgcccccgcgctcctgcttcctcccctctttccctccccgcctcccaggcgcgcacccctcccctcgcgcccctcccgcgccctacatccaccgcccggcggagggggctcagtccgcagccgccgccgccaccgccgcgcctcggcctcggtgcaggcagcggccgccgccgccgagacagctgcgcgggcgagcatccccacgcagtaagcccgctttctttccgcttgtgcgcgcgtgtgtgcctcccgcccgccggcgtcctgggtcccgggggagcggctgcccttctgccccgccgccgccgccgctcggggctggtccctgcggtcccggctgcctggccttccagggctgggtactgcggcttcggcggcctcgctgaggccgggggccaggggccgtcccgggctgcggggtgcgggacgagggactgcgagtgcgaggtcccccctggtgcgtgcctcg

SEQ ID NO: 10748 - DNA, 616 bp, Homo sapiens
acggtagttctcgactgaattaacccgacagcatctgtggaagtcgttggccctgtgccggggccagatcgcgcaactaggagcgggggcccttcacgtggcggaggcttcccggcctgggggccacgggcccggaggaatttgcctggaagttttccatcacggcagagccttctggagctcgccccgtgctcgacaaggggagccccagacttgatttctccagcagccccgcggggcggggccgagaaggggcgggcgggcggaggacgctggcgggagaatgtgcggaatgtgccaggcgcctctacctaccccaggaggggcagaggaaggggccggccgaggggaggggcgaggggcgaggctccgggcggccggagaaaacctgtttgttctcctgcgggcggagcccagtccgcgcctcctcgcctccctgcgcgctccccgctgtgcaccgcgccccgcgccccgcgcctgcctccccggcccggcccggcccggccgggcgccgtccacccgagggagcccgcgccctgcgactgcccgaccctccacccgccccacgagccgggcaccggtgccaggtagggctgtcgagtcgccattggatgcg

SEQ ID NO: 10749 - DNA, 206 bp, Homo sapiens
gcggcgggcggctggggaagcagctctgtggtctcccggcgggtgaggccgagacagagaccaacctctaggcggcgccctggcgttgagtccgcgctgaacaagattctctcgcagctctgcgtcccgcgccgggtgaaggggcgtgttcctgcaggcgctcggggctcggcctggagctggcggccggcacgtcgcctttggcg

SEQ ID NO: 10750 - DNA, 1141 bp, Homo sapiens
ccgcagtctgggagcgcgcggccccggggatggggagggggccgggaggaggcgtgcggctctgggggcgcgcactgcgggagcgcgcggtggcgaggatagggcgggccggggttcgcggggcgaaggcgcgcggtgcccgggggagggcgggccggggcgcgcgggccggggcgggggcgcgcgggccggggcgggggcgcgcggggccggtcggcgcgcgggggcggcgggcgcggcgctgccaatcgcagacaaaggccgtcccagtgaatcatgtggtgccgggggaggaagtgcggcttgttttctttcctccagtctcggggctgcaggctgagcgcgatgcgcggagacccccgcgggggcggcggcggccgtgagccccgatgaggcccgagcgtccccggccgcgcggcagcgcccccggcccgatggagaccccgccgtgggacccagcccgcaacgactcgctgccgcccacgctgaccccggccgtgcccccctacgtgaagcttggcctcaccgtcgtctacaccgtgttctacgcgctgctcttcgtgttcatctacgtgcagctctggctggtgctgcgttaccgccacaagcggctcagctaccagagcgtcttcctctttctctgcctcttctgggcctccctgcggaccgtcctcttctccttctacttcaaagacttcgtggcggccaattcgctcagccccttcgtcttctggctgctctactgcttccctgtgtgcctgcagtttttcaccctcacgctgatgaacttgtacttcacgcaggtgagtttcagagaggctcctggaggcgctcacctggcggggtggtccccgcggggcgcccgaggcaggggcgatggcagccgcgggggcgggtccggccctagggctgagagtgtagggagaaggcgccggctctggggtcgtccgaaccctgtcctgtttgcgggcatttgtcataggaaaccccctgccattcccaaaaggggcaaggagaaggcaggggagggctggaggccgccgctcactcgctgcccctggctccgcatcgtgcggtggattcggggcgcttctccgtgcgcagcgcgaagcagcagcgcctgcacacgccagttagtacg

SEQ ID NO: 10751 - DNA, 1819 bp, Homo sapiens
gcgtcgcccgtccctggcttctctgacagccgtgttccatccccgccctgtgccccttctcccggacagtgccttctccagggctcacccaggagggtgcagcggtggcccccggggcggtggtcgtggtgggggtgttagctgcaggggtgccctcggtgggtgggagttggtggcctctcgctggtgccatgggactcgcatgttcgccctgcgcccctcggctcttgagcccacaggccgggatcctgcctgccagccgcgtgcgctgccgtttaacccttgcaggcgcagagcgcgcggcggcggtgacagagaactttgtttggctgcccaaatacagcctcctgcagaaggaccctgcgcccggggaaggggaggaatctcttcccctctgggcgcccgccctcctcgccatggcccggcctccacatccgcccacatctggccgcagcggggcgcccggggggaggggctgaggccgcgtctctcgccgtcccctgggcgcgggccaggcggggaggaggggggcgctccggtcgtgtgcccaggactgtcccccagcggccactcgggccccagccccccaggcctggccttgacaggcgggcggagcagccagtgcgagacagggaggccggtgcgggtgcgggaacctgatccgcccgggaggcgggggcggggcgggggcgcagcgcgcggggaggggccggcgcccgccttcctcccccattcattcagctgagccagggggcctaggggctcctccggcggctagctctgcactgcaggagcgcgggcgcggcgccccagccagcgcgcagggcccgggccccgccgggggcgcttcctcgccgctgccctccgcgcgacccgctgcccaccagccatcatgtcggaccccgcggtcaacgcgcagctggatgggatcatttcggacttcgaaggtgggtgctgggctggctgctgcggccgcggacgtgctggagaggaccctgcgggtgggcctggcgcgggacgggggtgcgctgaggggagacgggagtgcgctgaggggagacgggacccctaatccaggcgccctcccgctgagagcgccgcgcgcccccggccccgtgcccgcgccgcctacgtgggggaccctgttaggggcacccgcgtagaccctgcgcgccctcacaggaccctgtgctcgttctgcgcactgccgcctgggtttccttccttttattgttgtttgtgtttgccaagcgacagcgacctcctcgagggctcgcgaggctgcctcggaactctccaggacgcacagtttcactctgggaaatccatcggtcccctccctttggctctccccggcggctctcgggccccgcttggacccggcaacgggatagggaggtcgttcctcacctccgactgagtggacagccgcgtcctgctcgggtggacagccctcccctcccccacgccagtttcggggccgccaagttgtgcagcccgtgggccgggagcaccgaacggacacagcccaggtcgtggcagggtctagagtgggatgtcccatggcccccatccaggcctggggatatcctcatccgcctcccagaatcgggccgtgggggacagaaggggcctgcgtgcgggcagggagagtattttggctctctcctgtcttcggggtttacaaagtgtgttgggacttgcggggctgctctgtccaagcctgggtctggcgtccgcgtctctgagcctgtgagtgcgtgcgctttcctgcgtcctcttgactgccggtgctggggctctgcgtcctgcgtccgcg

SEQ ID NO: 10752 - DNA, 1813 bp, Homo sapiens
gcgcccagtttcgagagcctatcacagctcacgtctgggcgcgcagtacccccccgacactgctcctgttgtgtcagatagtggcagtgttgagcccaggaatacgcgcggagcccgcggcgatccccgcggccgctcagtcttcgcggcggactccggcgcgcaggagccactgggccgcaagggcgccggggagcgggaggggcgctgggggcggcaaggggtcccagatcccaggccacgaactgttttccttttccccgggcaagagccccgctcccttcaactgacagaaattcactggggcaggggggcgagtggggagagaggtcgctcagggctcgctactggctgcgcctcccccggctctggtctgggaagcggctctgggccctccgggcgagcagcttgggcgccggcgccccctgcgaggaagatcgcggggtgacggtcggtacccgttcggctgggccgcgctgccgctccgatccacctcccttccgcgcccgcgccctcccccttcctttcactaggagtccgggattcggagagggcgcgggaggcaggcacacgggcccgaccccactccagcgctcaccggggacgcgggcgggcggcgacgggacgcggcgggggcgcggggcgggcgcggccatggagcagcagcggcggcggcggcggcggcggcggcaacactagcgaccgcgggcggacgagcgggcgggcagggccgccgggctcagcggaccgaactgcacagctcagcaaaagcgccctcgccctccgcgcgccgcctcctgcgagcccaaacccaccaacattttttaacgctccaacccatcctttgaagaaaagcaaaaaaaaaaaaaaaaaaaaaaaaaaaagcaaaaaaagaaaaagcattgatcggagagacggggatatatatatatatatatatatatatatatatataaaattttttttggctcctgctaaaattagcagggctcgccgcgcgcctgtgtgccagtgtgtgcgagtgtgtgtgcgtgcgggcgtgtgtgtgtgaatgtgattactccaggactcctcgggctccggagacgccattttcccccttgatatctctctccataaatcggtggcgcggcggaggcggcagagtcgggcgggaagcgcggggccggccggggcgcccgccgctcgccgccgcctccgcgcgcccgggggccccggcgccccccgagctagggcggccagctcgcggctcgccgtttgacagatgctcatcgccatggagttgccgcagcagcacctttgggggctcgggcgagcgacgggagccgggatctgagcgagcgccggggccagcggagccggagccgccgggacatgggtgagcacgcgcggcgaccttggcccgggagcccgggcgcccagcctccctccgcgccgcgggcccccgcactcccggaaccgggggcgacgtgtgtgccctgcatgcaaaagttcacgtcgccttgctgggtctttgactttgcacccggcgggaagggggagaccgggccgagggggcgggatgccggtccgggcgaggttgcaggagatgggcgcgattccggcgggccggcgggtgggcggcgatgctggctcaattggagtggctcgttggtggcggcgatggtggaagctttgggctggagggctgggagcttattgagtttcgcctaatctgatctaccccccctccgccccccgccttttgcaccctccctcggtcctgcagccggctggcggggctggcgggtttggcgttggtggagtggactcg

SEQ ID NO: 10753 - DNA, 1872 bp, Homo sapiens
gcgccttgccagtcaagtcgggcagccagggacccacggagcaaagacctaagcgggcatggctccgataaagagtgaggtccgtttcctccctgttgcttcgccagttactaaagatgagtgaggcggaaacacgacggtggggagcgcggggaatggaaaagccagaaggtctcgcaacaacccggtgtcacctgaatgtctgcaaaacgtgccggcaaaggcagccatgcccccaccccgaccctggcccagctgcccgggacacgcgccacgcggcggtcgttaacactcaggggacagacaacagtcacactgcactgacagcacgcagacaacaccggcgaggtgcacacccacacatccaacgacaggctccgccactgcgaggcggctgccaacctggagggaacagggaaagccagccgggtcccagcctccttcctccgaagcacgtttacctaaacgtcgcagtttgcgtccaggctgctcccgctccaccctaaagattatgtcaacgcaggaactgtgggtgcgcgcgggcggcccggcggggagcctccccttctgggtcccgtcggttttatttcgggagcgggagggggaggagggagggctggaggaggggaggggaatcccaaattaaaataaccctcagttatgaggacgttcggtggcatcggatattcacaccagcaacagtcacatcacattcgccttcgccagatggcggcgggttcaacttcccgggatctcgcaaactcaggctgtgcgcccgagcgcgcgccggagtgtgggcacgcgggcgggctggggactgcgggagcggcgcggcgcggcgcgagcccggggcgagaacgggggcgtggggttggggggcgccgggctcaccggttccggacgaggaggtctccgtccccggggagcggcaccgggcagtcccggctcagggtgacggcctcgcggaagttggggctcagccgggtcaccaccagcttctgcatggcttggggaatggcggagccctggaagtccaggaagtggcgggcgtacgacatgtccacgatggcccgggccccggtgggcaccagccgcagcatggcctgcgcctccgcccgctctctgcgccgacgctggccggggtcggcccccgcccgggccgctcggctcggctgtgctctgctcggctagggcgggcgggtccgcccctcctccggccggcgccctccccctggctccccccttccccgcgtcgcccgctcccgctccccccgcctccccggcgccggcgcagcccccgcgaacccgggcgcaccaccccgggtgtcccggcctggggaccgctgccgccccggccgctgctcctttaatctttttgttttggtttgaatctgctcggcgcagactggccaaggatcctctccgccctcccccttcctcctggcgcgggagaggcaccggatatccccaccctccccgagctctaaaagccggatttgactcctctcgggcaagggtggcgggggggacggcgggcaaggggggacgggggactcgcgcgtcccgcggtcgtctgcggccccgagccggcggcagccccgggcgtccccggagctgcgcggcggccggcgcaggcgcctccccttcccgtgcgaagcgttcacttccttgcaaggtggtacgaatcaaccccgagcgcggcccgggcggcggggcacgaccggggaccccgggcagggcggggagcccctgccgccgctgccgcacgcgcacccgtaccgaccgcggggcggggaaatgtccagtgcctcccgctccccaggctggtggcttcctgtccccggaaccccttgcgcgtgctttctgtccacg

SEQ ID NO: 10754 - DNA, 652 bp, Homo sapiens
tcgcagaccgtgcactcctgcagggggccccggatgcgatggagctgcgcgagctgacgccctgggctgggcggcccccaggtccgcgccgtcgggcggggccccggcggcggcgcgcgcgtgcgcggttgggggcgcggccttgcgggctgcgcgagctggaggtgcgcgtgagcgagctgggcctgggctacgcgtccgacgagacggtgctgttccgctactgcgcaggcgcctgcgaggctgccgcgcgcgtctacgacctcgggctgcgacgactgcgccagcggcggcgcctgcggcgggagcgggtgcgcgcgcagccctgctgccgcccgacggcctacgaggacgaggtgtccttcctggacgcgcacagccgctaccacacggtgcacgagctgtcggcgcgcgagtgcgcctgcgtgtgaccctacctcactcggccggcgcggcggccactccccccgcctcgacggcaccactggccggccccgcgaaagactgcgcgtgcgtagagcacgccggcgcggccccgggactctcgcgataactgtactgagataaagtgtggcaactcgagctggctggtgattcatcctcggcgaggggctcgcgtgtgggccacgtcgccgtctccaccgggaaagcg

SEQ ID NO: 10755 - DNA, 722 bp, Homo sapiens
gcgttcactcacggcgcgtgcagggccccaggcctagggagcgagcggggcgctatgggggccggagtctgggtccaggccgccctcctcctaacctcccttgggtccccccatcccgcggccctcttcggagcgtggctcaccgggcgtgaagagcgcgatggccttgaggcagccatactcggccgagtcgacctgcaggcggcccagcttgtccacctgctcctggaaggcgcgcacctggtccatgaaagccacggcgcgctcggcggccataggcgcggcgtggaggccggcggcggccagtagcggcgccgtgtgcaggggcagcgccgcctgcgccgcgttcagcacgaagagctcgctccagctcaggcgcagcagcgccacctggtcggccaccggcagctcggggaagaagggcgcgtggcgcgcccactccacggtgctgaagagcagccgcgccgccagctcgcacacgttgtcgatgcccagcaccgcgcccgccgcgccgccccctgcgccgaagcgtccggccgccgcagggtagggctcagcgcgcagcagctgcgcgatcagttcggacaccggctgccccgggaagaggtctccgccgctcgccactgccgccagcgccgagcccggggggctgcccgaggaggcggccacggcaccaggcagcgagtgcgggatgcggccgcgctgcaccgctgcgggaggcg

SEQ ID NO: 10756 - DNA, 858 bp, Homo sapiens
acgatcacgtcaccgtagaccagggtcacacgatagaccccgcccctactcaccgtcctgagtccgatcaaacagcacccacggcacacactagggtctccgtctctcacacacacacaccacaatgacgtcgtaaacaatagcactaaccaccatcgtccgcagctcccgcgtacagaggcctcaggctcccggctccacgtggaccgacctcgcccggcagcgcggggccacctcaccgcgagctcctcccgcagcccggcccgggtcacctcgactcgccaggcttaactcaataaccacaacaccggaaaaggaagcaaaggtcgaagttcatccgcggccctgaggcctgtgggaaacgtagtccaacaacgaaagagccctgaagctcaagcggagcccgctggccgcaggggccgcaccacgccccagaccctggagtttccgggtgcgcagacccttgccatcagcagaggctgccgctgcgcgtcccctaggcgcggaagaggcggctggtggtccctgacggcaaggtgaagtcgaggcagtaatcgggaacccaggttgggaggacagaatggggaacaggaagctggggcgagggtggtcttgggggaggtggggggccgcggaattctaggtggcccctgcctcacctctggaaagaaccggaagcccgggccggggagggtgaagggagtcgcggacccggctgctcagccgaggaggaaacccggaccccaggctgagggaggccgaagaaggaactggagggccgggctgggaaggcctgaagcgggtacagcctttaggctggggagggtcgaggggagaactcggagcctgagtcgggcg

SEQ ID NO: 10757 - DNA, 598 bp, Homo sapiens
ccgaggttccggcgggtccccgcaccggccccagctcctcccccgcacctgcctggccggcgggtcccaccctctctcctgccaggggtagaccctgggaccactcagctcgctctcgcaggccctgagcgtctgacgcctgcgcactgagcgcgggcgggcgggcactcccagaaacctccggggcgctgcaggcgggacaagcaggttccacaggccgagcccacgagcccctcgaggggtgagcggcccgggcctcctggcgttctggccggctagccaagcgctggactacatttcccagaggcacggcgtccggagcgctggactacatttcccagaggcaccgctcccggagcgtagcttcatttccgttagtttgcgagatttggaggcctcgcgtggggagagggccgcgtctgtggaggagcttggctccgcacctgctgggctggcgaacccgaaattgggcttggaacccgggagccagatcttggaccctgaactgcacctctgtcaaggtaggagtgtccgggatgccggagcggacacgcgcggagaaagcgtcgctggggttactcgtgtggccgtgtctccg

SEQ ID NO: 10758 - DNA, 1281 bp, Homo sapiens
tcgaaagcccaaagcctcgggcccaccggccagctccccaccccgctgctgggccggacaggtgtaggggaggcggacccgccccgcagccgactcacccagctccagggcctggtcgcacctgagcagcgcggcctccggctgctgctggcgctgcaggctccgcgcctggcctgccagcctgcgcagccggcactcggccgggaagcacttctccagcaggccgctcagcaccacgttcacgcgccgcacctgcggccgcgcgggccctggctccacgcagcgcttgcagactgtgagcccgcagggcagcgtcaccggcttatgcagcagccgccggcagcgcgggcagccgagcaggtcgcggggcgcgcggggctccggggccggccctccctcgccgggcgcctcgggctcgccgcccgggttctccgcggacagcggccggtcgcgcaggcccacggcgcgcaccaggccgcccgccagctcttccagctcctccggccgcagcgccccgagccgcgcggcgccgcggaacgcgcccagggcttcggggaggcggccggcgcgggccagcgcgtcccccagcctcaggcacaggccgcggtccggctgcgccagcccggctagcatggagcgaaagagctcggctgccatctcgtagtcgcccgcgcggaaggcctcgtcgccctcctctaagcgctgggcgatcggctccgcgcggtcgcagccaggacactggggcggcggcggcggcgggaccggctcggggctcatcaccgcggggctgcgacgacgcgggtccggagcgaaggcgcggagcagggaggatgcgctgctgctgggaactggccggcgggagcgcggtctcagccctcgccagcagccacgcgcgtctgggggcggcgcgctgcgagcggctgagaccgcgggcgggggcgggcgcctggcttgggcagcgtcctcagcgcggtgtgggcggcgagccccgcagggctgcaatcgttccggggtgggggccgggacaggcaccgcgggcgcaatctgagcccctgcccacgcgcagcggcctctcagtcccgccggcttaggtaacccaggtcgctgcggtaacgcagtgaccgcgctccaggtccgcgtctcttgcgatgcttcccccactcgcctgagggctcctgcgcgactgcgcgcgcgtcctctgcctgccgcctccccgcagaggtgccggggccctgggagcaggtggccttggccgcgggctgctggcgcgccggcaccgcg

SEQ ID NO: 10759 - DNA, 1788 bp, Homo sapiens
ccggccaggcccgccggccgctccagcccagcaccagggcgcccgcgcggctgccaaacacccccgggagttttgctcgcaaagggaccacgaggcagctgctggcgcgtcctgcgcgtacccgcccagaggctccccggcttgctcctcgcgggtctgtcccgaaactgacgtgaaaccgatttggtgcaatgcgaatgagctcccgcccgcctccgcctccatcccagccgccgccgccgcccgtcgccataacaaccggcccccaccccccccaccccacgccttgcccctcgggtcccccgggccacaggccacagcgcgggaaggcgccccgccctcggcgccccgcatccggccgccgcgcacccccgcccgcccggcgcttccgagccacgcagaggcgccccctcccgccggagacgggaaagccccggcgcccccagactgggctccgtttccagctcccggaggggctggggctctcccgcgtgcgccccgcacctgccgggggcccgtacccgccctcgccggggctccagggggcacgacggccgtggcccggcgctcttgggaggggagcgggacatccccgaaggcggcgcgctggaggcggggagcggccggggcgcacggagagggcggggagcccgcgggagggggaggagggggaggagggggaggaggcgcgaggtgggggggagcgcggcgggcggcagggagggagcgggagggaggcaagaaagtagcagaaagtgaggctggcaggcggcggcaaaggagccggcgcgcggcggcggcaggaagtctgtgcccgagaacagcagaaataagagccagggagggaccgcggccgcggcggcggcggcgagagcgaaagaggaaactgcagaggaggaagctgcgccgcagcccgagccgcccggcatccccgccgcctctgcgcccgcgccgcgcccccggcgccccctccccagcgcgcccccggccgctcctccgcgccgcgctcgtcggccatggcccgggagaacggcgagagcagctcctcctggaaaaagcaagctgaagacatcaagaagatcttcgagttcaaagagaccctcggaacgtaagtggggaccggggaggcgagggtggaggtggccgcggcaggggctgcacgggcagctccagctgccgccgccgccactaccgcggcagaaacccagcctgtcaccgcgtcctcattgtcccgttctcggcgctgcggagcccccccgagcgcgcccgacgcgtgggcctgcgacccccgggtgggcgccgttcccgggagggggagggggcagcgccgggctgtcagggagcagcccacgcgggcgcgcgacttcccacttctcctgccaccgccgccctctccgctgccttctccccacgcgtgactgtgggctgagcatggtggggatggctgtttaccggctgtgtgcgtttactcgccgtgtgcatgggcgcaccgcgttggcgagacgtggtcacgagaagatcagcctccagtcgttcccatttctgtccttacatcatgtatttctatggaattggcatctgcacgtacgaggtgtaggcaagactttgggtggccacgcgaggatggaagggaagggcttcgcagtgctcagggtcacacgtgggcagagcctcaccggagggtctgtgcatttcacgcgggctcggccgcacgcgccggggagcgcgtctccaagggagggtctgtgcgcgtcgctgcgcgggcggtgctctctccgggctgcatcg

SEQ ID NO: 10760 - DNA, 626 bp, Homo sapiens
ccgttcggttctccgcgcagccgtgggatctcgaggagggcgtccattaggccgcgtgtgaccatgtaaggtaaacagggggctcatgaagtcactgaggaccaatggggagcccggagcagagcctggggcggggcttggccctggcggcgggcgcggattggcacgctgcggatctccctgctgccttacaaggcggtgcgaggcgagctatttttagagggctatataagggggctgaggcggccgcccggcggccgggcagcgcgagcgcaagggacagggagggtcgtggcgacactcgcgccagctcccgggacggctgggctcgggctggtcgccgacctccgaccctccactagatgcctggcagagcccggcgcgtccggagcccgcgcccctcagagggaaggggtcgcgcgtcgccgcggcggccctgaggctgacggtcgggaggtgaaaggccggagtgcggggtcaggacgcctcctggagggggcgcggcgcagggggccgcggggaagccgccgagggcgcggagcgggaaggaaggacagtggccaccccgcctccgcctgggcacggggcagggacccgcgcgaggcggtgccggggaggtcctcacg

SEQ ID NO: 10761 - DNA, 1037 bp, Homo sapiens
acgaagtcctcgcgaactgaactgagagcagacaaaagcacgcgctcttctccaccgccacgccggtcctacccaaacccgcgagttatccgtattctccttcaggagtcatagtcaggccagaagagtgcggagggacggggcccgggaagagcagggaacccccagagcccgcagccaacgcggaggtgggcgagcgggcgtgcgcgcactcacttgccggcgcgagggagtgtcgggggggaagggagtggtctccaaaagggggaggggagaaggcagggggcggggagaagccggccctttaggacccggctgcggcggcgagggaggaggaagaagcggaggaggcggctcccgcgctcgcagggccgtgccacctgcccgcccgcccgctcgctcgctcgcccgccgcgccgcgctgccgaccgccagcatgctgccgagagtgggctgccccgcgctgccgctgccgccgccgccgctgctgccgctgctgctgctgctactgggcgcgagtggcggcggcggcggggcgcgcgcggaggtgctgttccgctgcccgccctgcacacccgagcgcctggccgcctgcgggcccccgccggttgcgccgcccgccgcggtggccgcagtggccggaggcgcccgcatgccatgcgcggagctcgtccgggagccgggctgcggctgctgctcggtgtgcgcccggctggagggcgaggcgtgcggcgtctacaccccgcgctgcggccaggggctgcgctgctatccccacccgggctccgagctgcccctgcaggcgctggtcatgggcgagggcacttgtgagaagcgccgggacgccgagtatggcgccagcccggagcaggttgcaggtaacgcggtctggaacaagtagttgggagaaacttggagggcagcggagaagcccgacgggcggctggaccttacggacggttttaggggcggcagagccgagaccttggaccaaatcaagggggactgttgctagcgggacgcggaagtcaggcccg

SEQ ID NO: 10762 - DNA, 977 bp, Homo sapiens
ccggacttgacggagcaatgcacgtgggcctttgactcgtaatacacccagtcaaagccggcctccactgccaagcgcgccagcagtccatacttattgcggtcgcggtctgatgtggtgatgtccaccgcgcggccctcataatgcagggactcctctgagtggtggccgtcctcgtcccagccctcggtcacccgcagcttcacaccgggccactggttcatcaccgagatagccagcgagttcaggcggtccttgcagcgctgggagaggaatgtgcgcgaaatcaaccagagcgaaatcagccggaggagccggccgaggtgcaggtgtaggcgcagcctcgcccagaactctcccgccacacccaagggagctggaagcccgggagggtgctgtccctctcccttaggaacagagggccctgaagtgctccctccctagcatacagccgcccccggggatctggaccgcacggcggtatcacaaatctggaggaggcatggaggcaagcgccctggcggcgccttcactggtaggtggaggtcccctctctcctgtgctgtcttcagctccgggtatccatccctccacagacaggactacacctttcagcgcccggtccctctgtgcctccaaggcaggagggccagccagcggccgggagggaggagtggcagcagagccgactgcctgcggccggcctgcgaggcgtgcaaggcccgaggtgcccagtaggtgtcaccgcagcctcagggctgaggcctggggacgacaggctctggaggcgcggcaggtgcagagcgtctcggtagcttcagggggtgtgttggaggggaatcgccggcctgcctggatccctcgagcaccaccgaggattcccgccgggaccctcttataatcttaaaccggcccacaaccccgccagagatgacagggccagggaaccagaaaccggcggattagcgccagggccg

SEQ ID NO: 10763 - DNA, 6206 bp, Homo sapiens
tcgtcctcctgcggcaggcgaggcggggtgcaggtgtgagtggggtgggaggaaggggaaaggatcggggtcgccgcagcctttctggtcagtttcgctgggttttgtcagttccgtttgagaccgaggcgcacggactagcggccgccagcacctcacaggtggaggacacctcttgcgccccaaggtcaatgtcatcccgatgggtcccgtgccgtcctgactctccctgacctaattctttggttatgactttctcaccttctgggcttcgcctctgccagctttcgccgacgtcgcccttcccgccgcccgcccgggccttcctacccgctctcctccctccctggcccgacggtcccactgaggcaaaaacaaacagccctgagggcacttcaaggagcgtgcagtggccccgacggtactctcggggggataaaagaggtggccagccacgccgtcggcccccggccgaataatgggcgcgcagcagattgccagggggcacttgaaactcgaggggagggaaatacttgagcgcggtccctccccgcgaggacgcacgacgcagcctcgcggatcgtcccttgttcgctctctttcatgcactctccttttgtgtggaattatctaaacgggagatccctggcagctttatgctaatgcgccgaacaaaggcaacggcccgcgggcgggaggcccggaaggtgcctggggccgggccgggcggggtggcggccaggcgggctgcgcgtgtctctcgcgtgcccctgggactgacacaacaacccctcattcctgcaaatacaaagcctctcaccggctcgggtcgggcgcacccggcgcagggaggcgctggtccctccgggcggcgggcactgcagcggtaacgcacggttcctgccggttgtggctcgggggactgagggccgggagtgggggcttctgtgaagccagaagagaagtctgcagcagagtggtgatgaggggcgctgacacctcacccccaacgccgacgtctccaaacgcgataccctctgcggggtgagaatgcgggcccgcccggctcctcccgtgaggccagggcctcctgttctcctagacaccccaaggagccaactcctccgcagaagttccccgcttctgctcttatttccaagcttcgcgctttctacaaactccctgttgccttgactttgatttccagccgtggtgagggtcagagtgaaccccggcgcgctccccgacggcatccccgcacaccaggataggagaaattggagggcctggggcctcgggctccgcagtcgtcggaggaagaacccaccgcggggtccgcaagggaaagtgaagaggcccgggatttttccaaagcgctggccaggaccccgaaggaaggggaggagtcacctgaagccggggaaggccccttgggtgctctgccttggatccttatgttcactgactttcgcgaagcccccctggaggggggcaaatccgcgctgtttcccccaacttaacttcacgcggcccattctccgaatcgcgtgcgccaaggccggcgtcgggggcgcactgtgatggcgctttgctcttcccaggcgaagacaaatatctcgacccgatgtccccatgcatgcgggtgcacaggttctgagaaaatcacgcagaaggcggctgcgatccacggcccgggctgggctacacctgcttggaggtcgctggtgtgtgcgtgcgcgcgtgcgcagcctaactccttccagccccgggtggtgaaattagtttccaatactagtacctttcaagtttccatttattttgactgtacccgtctgaaagcagatttcatttacgctagcaagactggaagccacaaataaagaaaaagaaacggattcattgaatctcagtatctcagtagcgtttaatagattcccttggctaaattcagagccctgtttgaattcactcacgcaggagttgttttgttttttttgttggtagaggtgccggtttcccatccccacggcttatttacaattatgggtgttgttatttttaaaggattcacaaggtgactaactctctgttatctgttgaatggaaggagtgttacatatgcaagaccgaatggggcaggccgagcccccgccctatgctattctacaatccagatgggattcgtgattagaaaataaaattggccaaagctgtctcggaatccttttcccacttctaatttcatcagcactattaatcagagctcaaaagagcaaggaaataacatcagttacttttagatagaaatatgtttataaattttagataaactcattttaagatttctaacttttggggagactagcactcaccacagcatttttaaaactagggtgagacttttcaaaatatatttcactatatgcattcttcccttttcagtgtgtgagttaaaatattacaaacataaaattatcaaatatctttcccttgattaaccaacctgattaaccccttaattaattaagcctaacaactgtccccatcacaacttatgactcatgtggactctatttttacatgtttaatttctacgccagggtattttcagagggaaaatccaaaacaattaaataccttcagtggaattaagcgtaagtaaaactcagcaaaatctgtctggtatacaaagctttgcagaaaaatgtttccttctctttcaataaagtgacattttcctcacagcatatgacattttatgtggcttggctatttgttccccagtgttggacgatcagggccactacgcactcgtggggttctctgccctgtcccccgaagattctgccttttgtgtttcctcggggctgggctggacagaggatggaggcaggcggcccagtctgggtccaaacggaacggcagcggaggtgggggtgggggtgggggcggggggaatcttcgctgttgtctcttcctggtggcacaggggaggcggcttgtcctctcggaggcctcagcctgcctcagagtacagattgccccccctccccccgtccagcacgcgtctcttttgcgtccagattggccgcgaccggagctcaatagcaggaggttaatttccttcacaaaggtgaagggggcacggctccgtgggggctgcgcccagacaggcagcccctttatttcgcagcgccttgattggagcccttgatttagcatctgatgtcaaccggcaaacaaaatgcccgctcggaatgaaaatgcatgaggccgcgcggggaggagaaagccaacttcactggggcgcacgaggccgaccgcgcgtttcgggcttcggccaactcgacccggattaaccgagccttggaccacgcggaagctccgggcggcctgggtcgggccccgccaaagatgccattcccaagcctccaagaacccaaaagttcagaaattcacgttcctctgggaacccagcccagcccgcccgcgctccaatcccgcgctttcgggagactgagaaggccgtgccaattccttctcaaactcgaaagaaaccttctctagccccgtgggcgcgcggaggctgcgagcacaaacatcgccctcggccactgccagaaggccgggccccctgtccacacttggaaccccggggaacccttttgcttggcctcttgggtccagcggcccatccgtccaaggtccgggcggaggccgtccggaccctgctgctctctcggattcttgtttatttcccaaacaccacgcggagccactgcgcctccgcaacgatctcccccgcaccgccccggcgcgcccccgcccccacccaatcagcgcgcacaacttccccctcggctccggctcgcggattgaaccctcctgacatatttggggccattcttctcctttgttgctattttgctagcgacccgcgggtaatccccgcgcgggaggggggcgtgcattgtcgcgctgatggacgggcccatttggcggctccgcgccccccggaggagagacacaaagcccaggcacgtgcgcctccccatagagaagcagcagaccgtgaagggaggcggggccgggcgtgtgcctggaccgggcggggcggcggcgccgggcggggcgaccaggggcgcgcgcgggggccccgcgccctcaggtacatctgccgcacctaccgggcgacccccgagtcccggcccccttttggccgccccatcgccctcccaccctgccaggctgaggagctgcggacgcgctgattggctccaggggaagcgggaggcgagaacaatggccccctccccccgttaaaagggagcggctgccgggcccggggacagggacgcgcgtgcagggcgcagagctgggccgagccgtcgccggcgccacgcgagtcccgcagccgccgcgcccgggcaatgggccgggggcactgagggccgccggggccgagcgcggaggggggaccgagccagtgccgtgccctcgggccgcgccaacatgccccgcggcttcctggtgaagcgcagcaagaagtccacgcccgtttcctaccgggtccgcggcggcgaggacggcgaccgcgcactgctgctctcgcccagctgcgggggcgcccgcgccgagcccccggcgccgagcccggtccccgggccgctgccgccgccgccgcccgcggagcgcgcccatgcagcgctcgccgccgcgcttgcctgcgcgcctgggccgcagccacccccgcagggcccgcgggccgcgcacttcggcaaccccgaggctgcgcaccccgcgccgctctacagtcccacgcggcccgtgagccgcgagcacgagaagcacaagtacttcgaacgcagcttcaacctgggctcgccggtctcggccgagtccttccccacgcccgccgcgctgctcggagggggcggcggcggcggcgcgagcggagctggcggaggcggcacctgcggcggcgacccgctgctcttcgcgcccgccgagctcaagatgggcacggcgttctcggctggcgccgaggcggcccgcggcccgggccccggccccccactgccccctgccgccgccctgcggcccccgggaaagcggcccccgccccctaccgccgcggagccgcccgccaaggcagtcaaggccccgggcgccaagaagcccaaggccatccgcaagctgcacttcgaggacgaggtgaccacgtcgcccgtgctggggctcaagatcaaggagggcccggtggaggcgccgcggggccgcgcggggggcgcggcgcggccgctgggcgagttcatctgccagctgtgcaaggaggagtacgccgacccgttcgcgctggcgcagcacaaatgctcgcgcatcgtgcgtgtggagtaccgctgtcccgagtgcgccaaggtcttcagctgcccggccaacctggcctcgcaccgccgctggcacaaaccgcggcccgcgcccgccgccgcccgcgcgccggagccagaagcagcagccagggctgaggcgcgggaggcacccggcggcggcagcgaccgggacacgccgagccccggcggcgtgtccgagtcgggctccgaggacgggctctacgagtgccatcactgcgccaagaagttccgccgccaggcctacctacgcaagcacctgctggcgcaccaccaggcgctgcaggccaagggcgcgccgctagcgcccccggccgaggacctactggccttgtaccccgggcccgacgagaaggcgccccaggaggcggccggcgacggcgagggggccggcgtgctgggcctgagtgcgtccgccgagtgccacctgtgcccagtgtgcggagagtcgttcgccagcaagggcgctcaggagcgccacctgcgcctgctgcacgccgcccaggtgttcccctgcaagtactgcccggccaccttctacagctcgcccggccttacgcggcacatcaacaagtgccacccatccgaaaacagacaggtgatcctcctgcaggtgcccgtgcgcccggcctgctagagcgcgccctccaccccggcccccgaactgtgccttcgcttggagacccacaaagagagtgcgccctgcactccccgaacccgagtccgcgctgggggagcctcgcccccgcccccaccgggtgaaagtgtcgtctccgcttctctcggtgtggcgtgacg

SEQ ID NO: 10764 - DNA, 574 bp, Homo sapiens
gcgccctcctccttgttcgcgtcctcggccttctcgctggctcctgcccgagtccctagcccctctgcaccacaggtttctggggcttcgtcccggacccggccattttccaggctcggagtagtcgccgtggaggccgcttccccgcgcccaggggaagggaaggcggtcccggggcccgctgcggggtggagggacccgcgccccccagcttctcgggcccgggccgcggggaccgtgcgcgcgtccccctcccgggcaaggccgggcggcgggcgcgccgcggcttctggggtccccgccctcttgtccgccatcgcctgcgggagcctctggcctggaggggctcggggcgcgctggcgactgcgggctcggcgacaggggcggctggtggcgggaggacagtgggaggaaggctccgccccacgcgcccccctctcggatgtgattcgccggggtctcccgcagccggggcgagcggcttggaagcccggaggaggggtacggaactgcccgatggggatgcgaccgcgggcgccagacgaactgtccccacattcgttggcgctggcg

SEQ ID NO: 10765 - DNA, 3438 bp, Homo sapiens
tcgctggtggagcccgcctccctgaagccggagttggcgagtttctcgcacttgaccttgtaggcgtctctctcgcgggccagccgggacacctcctgcttaagctgctccacctgctgaatgagctgcgtcttctcattctccaggtggtgcttctgctggacgcgtttatacctgcaagactgggcgtagccccggttcttcagggtccgccgcttctgcttcaggcggatcacctcgtccttggtgaagccccgcaggtggcggttcagctcgcgcacggacatggacacgagctggtcgtcggagaagcggtcctccacgctgccgttgccgcccgccgccgtcgccgaggccgtcgcgtgcggcccgggcccggggtggctagtgggcagctgttgcgccgggctagcggcgctggacggcggcggcgacgcttggtgatgatggtgatggtgcgggtgagcgtgcgggcccagctcgtcgtgggccacgccggcgcccgggtacgcgtggtgcgggtgagggtggtggtgatggtggtggtggtgagcgccgcgaaagctgtcgaagctttgcagcggctgtggcactgggtgcgagccgatgagcgcttccaccgcgtcctcgggcgtcaggttgagcgcctcggggttcatctgctggtagttgctcgccatccagtacagatcctcgaggtgtgtcttctgttcggtcgggctgaagctgggcgacgagggcacggagctacacggagtgctgagcggtgtggaggacaccgagccggctggctgcaggcgtgtgcagggcctgcccggacgctccgcgcgccccagtggctccttcttcacgtcgaacttgagcaggtcgaagtcgttgacatactccatggccagcgggctggtgggcagctctggccccatgctcagctccgcggccatcgctgaagcgaggcgcagccgccgctgccgcccgggaaactttgcggccggccggagcgcgccgagccaagcgcgggggggaagagcggagaagagctggggaggcggggagcgagggcgcagcgggccggggccgccggccaagcctttgtctggggacgcggcggcgcgccggagagtcccgaggctgcctgcaccgccccagagctctgggctgtgcccgcgcagggaccgggccgggtagagtcgggcggggtggagaggcaagcggagcgcgcggtggggctgaggggaggcgtggggcgagtgcccgttgctcgctctctagctctcttgctcttacgctctctcgctcgcagccgctcgcagctcggcggtgcagctgtgctggatccggcggcgccgcagccttttatcgcctcctgatgtcactggggtgcgggggcccgggcggcccggtgcgcgggccaatagctgcacggcctccgcggcccagcggcgcagggcggggcgcgcctgacagctcccccgccccccgcgtcagctgactggcggcccgagcggccccggagcggcggaggcctggcggagcgctggagcggagtgggacggccagcctgggcccacccccgtaccctgcaggtcccggcccacgcacgctcgcctggagtgcgcgccccacctctaggccaaatcaccgctttcccctcctcgcgcactctcctccctcagttccctttgcaccccacccccatcccgtgtcacccccaaggaggctcagaatgagcgccgggacaacgcctcctgggccctttgttcccaagcggcccccgcccagtgggcgacgctctgtgtgtcctcgcggcttctggccgtgtgtgtcgtgcgttcctgtttctggagatctgcgcgtatttgtatgttggggagggcgggctcgaggctccgagagttgtgttcagacccaactcttaacctcaggggacctttctcaggccaagcgagggcccctcctggcgggtgcagtcgcagagccctgaggttcgactccactggccccgccgctccccgcgttcaccccaccgcacaatgttcacagtgaaggcgacgggaaaagcagcagcccaaaggctctgaattcctcttccccgccacacgcacggaatcctgagcccccggagcctcggggccgaggccggcccgggacggtgctccgagtagctctccactgctggggagccggccctgtttttgtttgaacgttttgtaacgattaagcagatcccggcgtcagcccgccgcggagaggctcaaacaggcataaagtgcgaccccaagtggccactgtgcgcaaaggcgccgcgaccgcccggcccacggccggaaggcttggacggcgcctcgtacccagccaggtctcccctacctggcccaacccaagccagcccagaacgcatactatgtgtgcaccagagcccaggacaggttcccctcgagcgatgtacaggtcctcgggtcccgtcttcgtactcagccgcgagcctcgagccgcgagctccgctctggtcgccccgttgaaattccgtgccccagcgttcgggggtgcccgtcggctgctccctgggccggaaggtcctgggcggaggaaggccggtagccaaaagtggaagcgccacagtgaagcggcccagggccaccgggtgagaaacctccccggagggcagacggggagaccgaagcacaccgcactaggcatccagactgggcttgggagccgcgcaccctccctacccagatccaggatggctagaattaacgggttctttctgagacctcggctcaggcgccgaaaccggatagatcgcgaattcgctggacccggagacccgacccgcctcccgcgtcaccttcttctttctagctttgggcgcgcgcagcgaaaggcaggagaggcgcgcactgggtgagtgagtcccggccgctgtctgcgctggaccagcccgactgacctcgcgcgtaggggtcgcgtgagccacaccggtgcagacgcgcctagattatttttaaatgttagaaggtaaaatatttgcctccaattaatctgaaaactctctattctcttgcgccctcggagaggctggggtacggcgtggtattgggccgcctatttttaataaaatgagtgtattttaactaaaacttaactcaatcttgtggggtggcaaattaaatgctggaagagcgcgtctacaaccctcttcgagaagcgtgctctccgcagaaatgagtcggccgcctggagagagagcctgggcggtgccgctgcgcagcccctgccagtagctgggggttggggactcgcaccttgtaaatgtcctcgtcttgtttgaacgcagtgagagcacactcgtttccagatcactcgggaccgggtgtctcggatctgtgcagactatgtatggctccggcctcaggcggccagggcgggacaagcacg

SEQ ID NO: 10766 - DNA, 4088 bp, Homo sapiens
acgcctcgagcaccgactccacagccacggccaccgctcctcggctcccgtgacaccggcgcgcctgctgcttcgagcaggggaggctttgcactcccatcgcacttttctcgtccgaagatacgaaactccgtccgggcgtcgcaaataattcgaattcggctctctgacacctacctcggcgggcgcgcgccgctgggagggcggggtgggtggctggaggtaaggaggcgcacagcaggggtaagcgccgccgtcgcacactttgcacgccgcccagggctacaccactcaccgaaaattgggaggcaggtctgggaggcggggttgagcgcccaccgccttgggcgcgcccgcgccccccgccatcgcggcccccgcgcccccggcccacgcccgcgcggtcccggcaccggcctgcacccccagggtgcgcggcggcccatttgggtgcgtccccggtgggccgatttttcgcgcttccccttcggtttataggggccgctgctatgggtcggtcctctgaagaggctggggcgtcatcggggccggttagaagctctgctccccggcggggacactcagtcgcgtcggcaccgcggagcgggctgcgtcaggtggctggccggcgcggcgctcccctgctctctggctccgggctgcggcgcggcggctggagcgagcccctgtcccggcgcggggcggcggcgggcggccggcaggcgctgccttgcgtgtgagtgcacctcactcacatgtaagtcggggagcgccggggcctcccgcggaagtgcgagtcgcccggcgcaggcaagagccgccgggtccgggacaaggcaggggcgcccgggcgccgctgccttgccccggggcgcctccgggcaccccccaattctctctcttttctcttctccattggcgtgcccaagagccaaaccaaggagcgcctgagggtaaacagactcctgccatccgcgcctttgcacttttctttttgagttgacatttcttggtgctttttggtttctcgctgttgttgggtgctttttggtttgttcttgtccctttttcgtttgctcatcctttttggcgctaactcttaggcagccagcccagcagcccgaagcccgggcagccgcgctccgcggccccggggcagcgcggcgggaaccgcagccaagccccccgacacggggcgcacgggggccgggcagcccgaggccgggggcaagcagggagcccgggccaggcgcgagccgagctccccgaggtggccgggccaccatgctgaagatggccatgaagctcaaagcccgggcggcggagagcgagaagaagacggccgcggcggctgccgaggtggctgccgaagctgcggcggcggctgcggcgttggccgagccgagagagccgctcgcgccgcggaagagcggggaccccgagaagctcgcgaagaaccccaagaacccggcgcgggaggcgctccccgaaaagttcctaacagacaaggagcgcaagaagctcgagaagaagctgctggagcagaggcgaaaggaggagaagaagaaggagaaggagaggaagaagatggagaagatgctgaagaagaagaagaagaaggtgccagaagcccaggaggaggcccgatgccccgaggccgccgccgccgcggccgccgccgacgacgacgagggcgccgaggagggcgccgtcgggggcgccgaggagggcgccgccgccgggggcacgagtagggcctgggctgactgggacacggactcgagcgacgaggacgacgcctactacgcggcgccgcgcgttgggggcatcgtgtggcggcccgggccgctcaaggctggcgcgctgagcgcccacctgcccctcgtggtgttcctggtcttctcggtgcgcagcccctcgtgggtgctcaacttcctgctgcagaagcgcacggagcagggccgcggctgcggcttcgtgttcggggcgacctgctgcttccgagtgttcctgggctgcgccttcttctcctacttgggcggccgcgccaagcgcagaggccgcgggcgctccggggccagaggcgccttcggctcgggccatggcgcccggcgccgggggcgcgaggagcggctcatctagtcagaccccccaccccgccaccgccaccagacaccaccatcgctgtgtagtgtgggtttttattcgtgttcgtgtgtgtgtgtggacacattttccttttcggttgctctgtcctttggttcgtgctcgcctcgctttttccacactcctgctctctggctctctgtgtctctcgctctttcgaaaattttcctaagtccgggcgcgcgctccctccccttccgcccaccccagcccctcggcggcgcccgcgggagggggaggaggcctcgggggcgccgggcgacgcggtccggggggtggagcgttggcgtcgtgcgaggggtcgtcactggcgcggagacgccccctctcccccctcggctcagccgggctgctgcccgagcccggggggtggggggcgtctccccggcccgtcccgtccccggccgggcgcgggcggagggaccccctccccgggctcccggggggccgcctccctccgccggctcccgccctcccagccgccgccgccgccgcggccgctcctcggccctcctcctcctcctcctccttccacccccctcgccgccgccgcctcctcctccccccgcctccccccgcccgccgcggcgcttttggctcggggcggcggcgggggcccggccgaggcaataagagcggcggcggcggcagcggcggcagcagctcccgcagctcctgctctggtccgcctcggcccggcggcggccatcagccccctcggcctcggctcgaggggcggggagctgcgcgcgcccctcggtccgaccgacaccctccccttcccgcccgtccgcgcgccccgcggcccgcggcccgcagtccgccccgcgcgctccttgccgaggagccgagcccgcgcccggcccgcccgcccggcgctgccccggccctcccggcccgcgtgaggccgcccgcgcccgccgccgccgcagcccggccgcgccccgccgccgccgccgccgccatgggctgcctcgggaacagtaagaccgaggaccagcgcaacgaggagaaggcgcagcgtgaggccaacaaaaagatcgagaagcagctgcagaaggacaagcaggtctaccgggccacgcaccgcctgctgctgctgggtaagggcgggcggggggcgccggccccggcccgggggccctcgaagggcgccccgcaggccgcgcgcgccgagcccgccccccgccccgggcgcgcgctcccgagccccccgcccgttcgcgggctctgtctgtggggggcgaggccggaagggggacccaggggcgcggattcggccgggcgggggctcaaaaacggggcggggggccgtggcgacgcgggcgcgggtccccctcccccggcctgcccgctcagtgtctctctcttgctctcgctctcgctctccccctctttctctctttctctctttttccgcgaggcctacacgacgccaggggtttgggtgcgtgttggggagggggagggggagcccatggggctccggagactgcgacaaaaagagggtttcggggacaggaaaccgggtggcgggtagagggagggggacccgcctccgtggggtgtgagatttgttgggagagggaaagaggggaagaaaggggcgaggagaggagggggtgacgctggggggcgccgtggtggcggagggggcctcgccaaagggaggctttggcggggagaagtggccgaggagagtgggggggctggtgacatcagcccctcggaaaggatcggagcggtaaaggtggtgcagtgggggggagggggcgcaagggagtcgtggcgccggagtcgggaggggggcggcgaggggaggagggagggcggttgccgctgggcgcgacttggtgcgtttcgggcaggaccgactgactgtgtgtgcgcggagcagacgtgtcccgggccaggccgggccg

SEQ ID NO: 10767 - DNA, 522 bp, Homo sapiens
ccggctttacttcgtttaaagccggatttcgcttagtcccgtgaaagcgaaggagcaccagcgcttcctgattccgcacagttctctcggcagagacggcccgtcctctccaagaaccggaagccggacagcgtcaggacgttttattcttctcacctgggattcagagaggcagcggccaaggacagggcccccgccgaggccaccgggcagcgtccaggtctcggcctttgggaggggagcagcgggggaggggcacggggaggggcgagggcggggcgcgcctgggcctcggcgctgggctcctcctctgcccgctccgggggacacccacaggattcttgcagacctctgccgaggcaggatggaggcctgcagggatgcaccgcgggcccgcgacccgggcggccggaacatagttctttctggccggagatcggcccggtcgtgagtcgtgtctgtgccaggccccccacgctgtgctccagggcctcagtgcccggcgcgccgggggctgtatcg

SEQ ID NO: 10768 - DNA, 2260 bp, Homo sapiens
acgttttcggaaagcctcctccaatgggaagcgacttcgccgctgagttaagcgtccgaatcctccttcccgcggcagggacaccggcccgggccaggtctgcggaggacgcccccgggcgcgcacacacagcccgaggacgcgccctgtattttaagacgcagggtcggatttcaccccgaaacttggctcccacagccccaggccgaactgtgtctggttctcagcccccgagcccgagttctacgccgcaaagagatggggccccattgtgcctagctggcctcctagcacggacgtgtattttcttttggtctgtcttttgctaaaaaccggcagtgcgcttcgcctccctgcccagccgcagcctgccgtcccctagacaaaaagcggcgaccgcggcccggccacccgagccccgccgcgctgcgcctttgttgggcggtccacagatggtgcccagcacggggccgcgccgagggcgggggcgggaggccgcgaagagggtcgggcgggaggggaggagacggcggagcagccaatccgcgcgcggcccatcagctgaccgcctttgcttacaccaggtgcacgccggctgcggggagcacaaagcggggcgcaccgcgggcgccggcaacgagccggtgaacgaggcgaggcccgtgcgcccgcggctgcaagcgcccgcctggcggggagaggggccgacggcgtcagcccgggcggcggcatccctaggcgcctggggcgccttcctccggacctggccgctcgctgccccgccctctgcaccccacttctccgaccctccttcccagtcctgcctccccctgccctggcctctgagagccgactgagcccagccccgtgcagcagcggttgcctgtgtcgccgcctagtctccggtcttggtgctctcccgggggtgccccaaggagccagtgcgcgctgcgggctgggaaggaggcgccgctcagctagtcctcctcctcctcctcgtctttctcctcctcctgctgctgctgccgccgccgccgccgtgggtgccgggtccgcgcgcaccccaacacccccaccagctgggcctcggggtaagtccctggccggccgcgccgcggcaggaggtgtgggaggcagcgaggggaagtcgaggcaaacttggtggcgtgggagaccctacggggtctggggaacctcagggtaagatcgcgggcctgagggggacgagggggcgcggctcacggagctggggaaaatgacgaagtcgggaaacgagaatatagtgccccgtttccccccgtcccccttgccaaaaaaaaaaaaaaaaaggtgtgggagagcgatagttgggaaggcaggccagatagaaacaggcaaaaaaaggcagtgaccggagccgagcctgctggatttcaggggccgaccaggggagggaggtgcccggggacggggagggaggagggctgccgggatgtgaaccggggaaggcagctggggctggagagcagcgcggaaagggggcccagggagctggaaagagggccaagaggagggcaaggaaggtggcgggcgacggggagaggaaagaaaaagggtgtcttggcggtggccttggtaagagaaaggggcaaggggtataattgacaaggcactgaaagtattgaagtcagagccttgggaaggatctaccgaactctcggcggtccacgcggggacagacctcagcccgtgagccttgagctccacgcggggacagacctcagcccgtgagccttgagctccacgcggggacagacctcagcccgtgagccttgagctccacgcggggacagacctcagcccgtgagccttgagctccacgcggggacagacctcagcccgtgagccttgagctccacgcggggacagacctcagcccgtgagccttgagcccagaaggagtggcagcctcaggacgtttgccaggtggcctggaatgtgagggaagcctcagccccgccaggaacagagctggcgctgagttcccggctcggcccgggtcagaagcgaggaaagtttgccggcgagtgtcctttgtgctgcgtggagaggggtgtgggcggccgccgactcggcgcttccccgccgcccgcccagggagtccctgcctggcaagctggggctcggggaaaagtccagcagcgagagggccgcgtgtcccgggacggttccaggggagcccgcgcggaaacgcggaccaggcgcttcggcccggatgccg

SEQ ID NO: 10769 - DNA, 1502 bp, Homo sapiens
ccgcgggacggagacagggagttgggaggaaacgcaacgcgcctcccaggcaacagactccgagctccggttcggaaacgctccgaggcagaagcaagggcttctaagggctccgcttcccagccttgggtccctactactaccttccccctagactcggtgagcccaggctgatggaccgtgcagtccagtttgagccagcccagcagccctcaatcgggcgggcagggaagaaggcctcctactgccgggaagaggccagcgcgctccaagttccccgcaaattccgcccttcccgcctggcacggttcccttgcaccgctgtgctccgctcccaggtttctgcccgccaagaatgcttgccccgggggcgcgctcgctggtcaggaacctgtcggcagcccccgggaacccctgaggatgcggaggtgggcccgagagctgcggcttcgatgccggggtgggagctaggcaggccgcgcgccgccgcagtcctgtcgcagcgcgtgccctggtccctccggaccgaaaaggccgaagccgtcccccgcgaccgaccccgcgcaactggctcgggtctgcacctagatggctgtgggccccacagggatggccgggcgggcccgttcggccgctacctcagggtcgccagtccccgcgcgcggccgcctcccgccaggaagggtggcgggcccggaaggccagagatgccccagtgcttcccgcgccgctacgcacctagctgcccgcgggtcccacatggctgcggccggagggtccgcaccaggaccgccgccgcctggggaagcgcttccctgtgggcagggcgcggcgggcagtgcggaagcccgaaagctaccggagcccggggcaggggcggcgcgatgcagaggcggcgttcgggggcccccagctgcctgcggctcggctacccagccgcgatcagagggggcgggggacgcaggaaccccggcgtccgggcggtgtgcagccgcagacctattccaagtttccacgtagttgcgagagcccaaaaactgtcacgtgcacgtcgctgctgagtgggaggaggtgtttgtcatcgcgttcaaaaggggcgtttcggtgtctcccgtcatgcaagcaaatggtatggctctcggccgcctttgaataaacgagtgcttcgaaccctttaccaggagggactaggcgcacaaccacctccgacactcctcgggcatgcgagaattcggctttccttagtggggcccatcaatgttgtccgggaggtaaagaaagtgatcggccaacggcctcagcgtgggttttctccttccctcgttcctccctccaacaaaggacgtacggagaacaagccccctagctcctacagatgaggagctcaggagtcgggcgaatatcaagtacttactgtgtgcttgcccctccactctggggaggctgggggtccgggagtgaagggggcagcgagaccgcgggctgctccacgctcaccgtcg

SEQ ID NO: 10770 - DNA, 510 bp, Homo sapiens
gcggccggtcctggaagaggtgggggcgaggggtcgggggctcacacgccctgcgatttcctcccatgagaatgggcgggggcagctccgggaagggtggcggatggagccgccctctccccaggaccacaggggcgctttccagtgaaggcgccgtaggaaacgccagtctgtgccgcagtgtacgtagaggcgctatgagcccgagtttcccacgtccagggacaaactgggagccgtgactgtcaggccgcgcggaggctgccctggccgcctttgcggtcaggtgaaggcgcagaggcagggaggccgggcgagcgcaggcgggcggagagcagaccacgcggaagaggccgagagagaaagcggggcacccggccgggggggtcatttacaagggacgctgggcacgaaggaggctggggcgaagatgagtccaggggttgggttgagagcgctgcgcagccgggctgagaagagaagctgacgagtgactcccgacaagggacg

SEQ ID NO: 10771 - DNA, 940 bp, Homo sapiens
tcggggcgcaggcaggaggcactggaagcggaagcgagtggggagtccgggtagagggagtcgcccacctgaccggcttcgccccctccggggtttgctgcagctgagggccccggaccagcgattctagaagccggtccggggccgggcagtccaatagcttctcgcggatttccctccgctggcgcgcagcagcggcgcgtggattcgcgcgcgggctcgggacggcgcgagcccgggcagcgcgagcccctgcgcggcagggagtggcgcatgcgcgggcgtcctgcgagcccgctggggcgagccgagccgcggcggcgccgggagccgggcggcggagctgtgaagaagcaagcggcggcacgggagcagcggcgacggacaggtggcgagccttcgcccgcgccgccaggggctgctgggccacccgcggagcctcgcggtccagacgtggcgggggtggcggcggcatcccggacggcctgtgagggatgcgccgcccactgccccgcgccgcctgaccgtccccgcctcgactcgcggtgcgccacagccgggcccgcggccgtccccgccgcgttgtcgcccggtcgccgcgcccgcggggccgcgcccggcacggccatgtggacccccacggaggaggagaaatacggcgtaggtaggtgaggctcaggcctggccgtggcgggggttctgggggacgcgcccagctcccggccccgcctggattcgcatcctcgtgcccccgccactgcccgcaggctgcgcggcctcggcgcggggcgagcgcggggtgggggcaggtgcgggtgcgggtgcgggtgcgggggtgggcgcgggtctctgtgcagagagggcggcagggggcgctggcggtgcggccttggcaggtgcggcccgcgggaggggtgggcaaggcccgggcagttgcccg

SEQ ID NO: 10772 - DNA, 2718 bp, Homo sapiens
ccgccgttagttatgattcatgctccagcagcgctgggaagtgggccgagggaactgaggccggggtgggtgcggaggtggctctgacggggagcgccgatccaggatctggtccggaccctgagctcggcaggacctgtgcgcacgcaggtagcgtcgcgtcctcccccaggctgcgagaggttgctctgccatcaggccatggaccccgagccgcccgtgctgcgcgcgcgcgtgtgcgcgcccccgcctgcgcccatgcctgcgccgggggaggcgaaggaggctccagtcttagaaagagcagcttctggaactcaccacccaggccggccgccgctcggccccgtcccgcaggctgcaggcggccctggagggggcgccctcgccgagcgcgcgccccgcgccgccgccccggactcctccccggcgccgcgcgggcaggttcgaccaggcggccgcgggctccggttcccggccagctccccagggcccgcggcccgccccgccccgcgcgcccgccccgctgcgcaactcgacccaagttggaagccgatcgcaggcggccgcactcgcgcccagcgcagggcggcggcggcggcggcggcgcagctccggcgagcgaggcggcggccgcacggccaagcgtggaccgcggggggcgcccgcgcccgggagcagccggaggactcgcggcggcgccggcgccccgcccgggaaagtaaagttggagacggagggagcgcgcgggcgcgggggcccggaggagcggcggccggcgccccggcgcgccgagccctagccggccggatgggaggcggagcgcccgggccgccgccgcctgtcgcctgcgccccggctgggctccgggaccgcggggccgctcaggcacgcccgctcgggcgccgcgtcgccgtgggctcgacgccggggcgctccccgtgagccgggccgagggcggggccgcgcgaggaccccgggacctgcccccctccccccgcagccgcgtcgccgctcgctccgggcgcctcctgctctgcacttacacgctcggcagctgcggggagcccggcagccacgctctccggcgcgccgcccgcggagccaccacggccgagggccggctgctgggcgccgcggtccccggcgggcgcgcccgagcagcaggcggcgatgcgggcgccgaccccggctggggggcgcccgagctgccgcggctgcgccccggctccaggagggacggcgtagctcgcgggaggaccatggcgtccccggcgctggcggcggcgctggcggtggcggcagcggcgggccccaatgcgagcggcgcgggcgagaggggcagcggcggggttgccaatgcctcgggggcttcctgggggccgccgcgcggccagtactcggcgggcgcggtggcagggctggctgccgtggtgggcttcctcatcgtcttcaccgtggtgggcaacgtgctggtggtgatcgccgtgctgaccagccgggcgctgcgcgcgccacagaacctcttcctggtgtcgctggcctcggccgacatcctggtggccacgctggtcatgcccttctcgttggccaacgagctcatggcctactggtacttcgggcaggtgtggtgcggcgtgtacctggcgctcgatgtgctgttttgcacctcgtcgatcgtgcatctgtgtgccatcagcctggaccgctactggtcggtgacgcaggccgtcgagtacaacctgaagcgcacaccacgccgcgtcaaggccaccatcgtggccgtgtggctcatctcggccgtcatctccttcccgccgctggtctcgctctaccgccagcccgacggcgccgcctacccgcagtgcggcctcaacgacgagacctggtacatcctgtcctcctgcatcggctccttcttcgcgccctgcctcatcatgggcctggtctacgcgcgcatctaccgagtggccaagctgcgcacgcgcacgctcagcgagaagcgcgcccccgtgggccccgacggtgcgtccccgactaccgaaaacgggctgggcgcggcggcaggcgcaggcgagaacgggcactgcgcgcccccgcccgccgacgtggagccggacgagagcagcgcagcggccgagaggcggcggcgccggggcgcgttgcggcggggcgggcggcggcgagcgggcgcggaggggggcgcgggcggtgcggacgggcagggggcggggccgggggcggctgagtcgggggcgctgaccgcctccaggtccccggggcccggtggccgcctgtcgcgcgccagctcgcgctccgtcgagttcttcctgtcgcgccggcgccgggcgcgcagcagcgtgtgccgccgcaaggtggcccaggcgcgcgagaagcgcttcacctttgtgctggctgtggtcatgggcgtgttcgtgctctgctggttccccttcttcttcagctacagcctgtacggcatctgccgcgaggcctgccaggtgcccggcccgctcttcaagttcttcttctggatcggctactgcaacagctcgctcaacccggtcatctacacggtcttcaaccaggatttccggcgatcctttaagcacatcctcttccgacggaggagaaggggcttcaggcagtgactcgcacccgtctgggaatcctggacagctccgcgctcggggctgggcagaaggggcggcccggacg

SEQ ID NO: 10773 - DNA, 2661 bp, Homo sapiens
gcgcggccctgctccgcgctttctctagccagcacccacgtgtctctatttactctactcaggttaccagctctatcgcccgcagcgggccagaagacccgataaagcgccttccaccctgcaggactagtgcccggcttccgctgcttctccgcctttcttctgcgtagatttaaggcctgatccggtcccaaaccccaaataaaagttgtgggtttgtttccaagtgatggcggttggagaaaactagagttgggggcggtacagccagggtgtacccttgcggtgggtcggctcggcgcacccacagctcccagctgctagcccaggcgctggggccgcagggactgaaccccgcaccgcccccgcagcccgggtgcgcgccccatcggccggcctgctccccgcggcccggctcaccggtggtagggacggccccgcctgccccagcccacgcccgcctccccttcctcccgcctgtggctctgctcgtctccacctaagcctttggtggtttaacgcacttttgcagagacatctaccaagagatagcgtgtgcactttgttttccgtcccacggaagaatttatcagtagcgttattcagccctactcgctttaaagcacggcacccctcagcccaacaaaaagaccgaaggcgaaacattgtgggttcctgcccgcgaaccaaccgttcagccaccgaaccccctaaactgatccatttggaataagttaccctgcccctctacctcccatcctacacacacacacacacacacacacacacacacacacacacacactgcggaccgggggcccagctacgcacacaccccaaaacaaacgagggatctactcgggaccctcagccgggcggccgggcgccttcgttcccttcctccctctctgagtttcccagggacccgccacgcctctcggaactggggcagcggcccgctcacctcgtgtccgttgctggccgggatgatttcagactcgttcaccaaggaagacttgatgtcagctaaatcgccttcctcttcgggatgactgatctcggcgaagatcttttccttctgaggatcgccctcgtccttgaaggggatcatctcgtccgtggcgcagagttccgggtcccccccgccgccgccacctcctccggagagttggggcatcccggcggctctgtaatctccgctccgctgtgggagcacccgcgcaacagcaggaaagacagaggggtaactcaagggtgggggaggaaaggagagttggaagggttcgtgcagcaggacagcgggcggaagcggggcgggcgagcgcggggccgccggccggcagccggagcagctgccgcggcgcccgaatcccggcggccgccgcgctttcccgcttcgcggagaccgacgcaggcgcccgcccccgaggccgaagggcactgggcggcgagggctgcggtagctggcgactccgggggcgtctgcgcggcgcgcgctagacgaggctgccccggcggccaccccgcgaccccgcgtcgccgggatttgcgcgcggagaacgccggttctggagggagcacgcctccccaaagtgcagaggagggtccggcggcgcgtctccgcggaaaccctctccactgtagttaccccggatgccgacttagtagtttgttttccgagaaaagagaggggatctgggcagaagggccccgtttgccccaaaagaaggtgcaaggatcagaagataacgaaacgtccacttcctgaagggtgggaaaaaaagaaaaagaaaaaggagccacccacgctggagatgtccgttttagatcttcttattttcttccctttcgcttcggtttttcttctcgaggctcatttaatctgctagagaaggaggaggagcagaagatgggggccgaggaggaggggaagagaaagagaagtttgccaagaataaagtttttgccggcaagcgcggggactccgcagtggagggcactgcggagtctcggggagtcacagcgggggcctcgggcccaaatgcctctgcccggagctcgagccgacacacacactcagtccgacccctctttgttcccggctcgagtttctcagcctggctcgccggctcgccgctctgcacgcctccgccggccagctctgtcaaagcaaagagctgcgccccttgagttcgcccggccgaggggaggggacgccccgagcttggccgcgtgcgaggctccgggcgcgtcctggttcctcggcccgagagcgcgcagcccgggtccctcctccgcgccctgccccgcaggtgagcggctgcgcctccccactgcttctcctcctcccgcgcctcgccggcgctgaaaagctacccacttgcgtcgcttctcctccctctcccctcccccgcctctagctctccttggctgcccgctggaggggaggcggggggtgagggggagtcggcgagaaggaggtggtgattgagggcttttttttctttttcttttcccagatcctgtaggacgagtcttggttttggggtgtgtgagtgtggtgtgtgcgcgcgcgcctggagggaaggatcaggcaacttggcgagagaaggaaggaccgggcgctgcttataacccaccgaaaggcacgctttgcccgcg

SEQ ID NO: 10774 - DNA, 801 bp, Homo sapiens
gcgaggaaaattgacgttctattcctccggatcctgctcgagaagctgggggactcgggtccggtgccgaggtgtggcccgagcctggcaccacccacgccggccgggtgaccccggccccttggggctcccgcgctccgtcagcaggcgacgctgggaggctggggtaggcccagagcgaggacgggcccggactgggtagtggggatgtaccagggccgggtgcggcgggagacggcccgggaggcggaaggtcgcggacctgcccgacagaagagtagatgaggggagaccgaggacgcccgggtccggggagcttacgaggaggccaggatcgcggggtaaggaatccgcgggcagttacctccgccaggggcagggtccggccagtcaggcgcgagaaggctaggcgaggccgactgcgcggggtgaagacgccaggccgacagctgcgggccctaccgccagccctgacgcgagcctgcgtcctggcgacggcggagggcgggcagggggcgcgggcgctgccacggcgcctgctcagaaccggccgggaacgccgcgggcgggtctccccggtcctccgcccctccagccctgctctcaggcctccgcccgggccctctaagctgccagccgcgcccgcctccgggctcctcgcccctcctcccgcgcgctcccctcctcagcggccgccggaccccctcagttcacttctcccagttaacgcgttcctcggacgctgctagtttgagcgcacaggcattgggcggggctcacgggggagccgcttaataaccg

SEQ ID NO: 10775 - DNA, 311 bp, Homo sapiens
tcggtctccgcttcggtggtttcaggtcccgggttctgtctggcggctctgcttctaatgcggagctggcggttttgcagcaacgcttttgccagtagcgcccactgagcggtttttcagttgctgcaccgttcttagcgcccaacggaacgtttcccgtacgcggagtccataagttgtctgtgtcgtcactttctcggttctggcaccgctagtatctcctaggaacttcctaaacccgttttacggtgcagaacggtaattgcaccgagcctctgtgccaactagtacttccgtaataccgttagccg

SEQ ID NO: 10776 - DNA, 1048 bp, Homo sapiens
acgggagcaggccgggctgtccacgacggaagcctcgaccctggctggggctgtcggccgggcagcgcgggagagccagggccagagccggggccgggaaccctagtcccgccgcctacgcgggatgcagcgaccaccgcccgccgcccccgggccggcactcacctccgtggaggggcagcggcgccagcacctggccgcggacctcggccttgggggagtcaagcccgtagcgcccgcggtcgatgcgaaacgtgagcggggcgccgcggccgggctcctgcaccgtcacgttgatgagcgccgtgtagtactcctggctcgcgttgtctgcccgtgccggccacaggctgcaggtcagcagggcgagcgcggcgagccgggcagggcccgcccgccccgcgcagctcatcgtccctccggcagccgccgctgctcgcggaccgggctccggggccggcgcctagaggcggggcgggcgcggcccgggcggcggcgggagcgcgcgcgcgcggcctgcgcggggccgagcccgagcgcggccctcctggacgccgcggccccgccgctcgccgccctcacgtccactgcccgcctgtggggacgcgcccatgggccctcggcgagggcggcgtctcaggtcgcacgcgggcgtctcttcggggtcccaggagggttgtagaagcgtgccccctccatccccccgggtcggtcccaccgaatgggaggcgcctcgcaaggacgcggcgggggaggggaagggcggcacgggaggaagcgccccgaggagggtcagcggaacacaaagtccctctcgcgcggctgccgcctgaggcgcgtgtccgccgccgccccgcccccccgctggtctagcggcaacgcgcaggcctaaggcgcagtcccgccccgagcgcatgcgtgccagggcctgtccgctcccgcccgcctgcacgagggcccgggcagccgggtcagccgctggtgctggttgtttctctgtcaggcgtgatagccgcagggcgtggagcccgggagatttgcgaggacg

SEQ ID NO: 10777 - DNA, 301 bp, Homo sapiens
gcgaaatccgctcccgccccgaagaagggctccaagaaggccgtgaccaaggcgcagaagaaggacggcaagaagcgcaagcgcagccgcaaggagagctactccgtatacgtgtacaaggtgctgaaacaggtccaccccgacaccggcatctcctctaaagccatggggatcatgaattcctttgtcaacgacatcttcgagcgcatcgccggcgaggcttcccgcctggcgcattacaacaagcgctcgaccatcacctccagggagatccagacggccgtgcgcctgctgcttcccg

SEQ ID NO: 10778 - DNA, 1395 bp, Homo sapiens
gcgaaccgatctgcacccccctgcccactaggaagcggtcgtcgccgccgcaactgttggcgctgaccgcgcacgactggaaagttgtaatcctatggtccgaggggtaggctcgggctgagcaggtccccgagtcgccactgctaagtatggggtattccaggaaggagttcattcttgcattgtccatctgtcactgagtgacctggtcctgcgaagcccggcgtgactgtgccaactttctcacttcctccatggggccggagaagaaaaatgatatgaatgtacagtgcgcaagagggggggcgggagggcggaggacgctggaggaggggcacgtgacggtgtcagccaatggctgagcctcctgcaaaagtttgccggcttccgcagtgatggatcaccgttttagtggcatttaaatccccggcgctccgccgtctaggtgacgcgcagtcgcccccccaggcagcctaggcggcggcagctgctgcggcgactgcaaaggccgatttggagtgctggagcgaagaagagcaaaagctgcgttctgcgcgcgcccgactccgctgcccgccccgccaggcctccgggaggtgggggctgggaggcgtcccccgctcccgccccctccccaccgttcaatgaaagatgaactggcgagaggtgagaagggaagagggctcccggctctctcggggcgggaatcagtgggccagagctcgccgggtggccgcaagtacgccggcccagcccgcagcgcgcccagccggaaggcggggaatccggctgacaccgcgccccgggttcccaggccacctcctctgttctgaggctgggctgggagaccgtggggctgtgaggagcgcatagaaccgtggtggagggcgaggctgggccaccggctcttcaagctcggaatggagggggaagagcgcagagggctggctgggaggaactcgggtgggcgtgaaggagacgagggcaagaaaagaaacttcccttcttccaggagggtcttcgaaaccctctccccacagcccctctcgtcattagcatggcaatgaggagtttctgtaattcgacttggaggggcggatgagccctggaaactcagagctcgccggaaaaggccgggggcggccgggctcttcttccccaccttccctctctcgtcgctctccgcccctttctctttcccactcagttttgcaccgggagccctccgggatgcggagctactcgaccgccggatttttaggggtaggaggcgggggagagagatgacgctggcggacgtggccagcgcgggggccgggcggtgcgctgcaggccatctgccggcgccctgagacccaggagcctccgcgctcccgcgtgggcctcacagggccg

SEQ ID NO: 10779 - DNA, 766 bp, Homo sapiens
tcgggcctccctcgctgtggcccgtctgtatccttgagctggcatctgcctcccgggcggccagacgcccgcctggccttccctccggcctcggtttcccctccgcggcgctccaatggcccccgccctccgcgcagggccacgactgcttcccggtgctgttcacctatgacgccgccgcggggatgctgagcttcggcgggcggctggacgttcctaagcagagctcgcagcgtggcttgacggcccgcgagcgcttccagaacctggacaagaaggcgagctccgagggtggcacggctgcgggcgcgggcctagactcgctgcacaagaacagcgtcaggtgagagcgggagccgggccggcgggtgggcggggcctcggctcgcccagaaacagcgtcgggtgaggaaggggcctggagtcttcctcctggggcattgtgctgggaccttgaggactggggacccggagggagggtaggcgtgccctcaactcgctgcgccggaacggcgtctgatgagcggcgggcccggacacgaggggacggggccgatttgtgggcggggccttggcgccgtactaaaaccgcgtggggcggaggccggcagaggtcgcgtagcgggcccagggtagggagtggctttgactcgctgcggaataacatcgttagttgtgggcggggcccatcttgatctcaccatagcagcccaggtgctagtggagcctgggagggacacggtgcgaccgacataagacggggtcg

SEQ ID NO: 10780 - DNA, 691 bp, Homo sapiens
gcggtaaagaggccggacacggaaccgctcgtccggtgaccgaagagacggcgaggaggagcccgcgaacccgcctctgttcaggccccgcccactcgacgtaatttgcccgcccctctccaccctccgaagggtggagcctgaggccccgcctccaagcggcctctccccggagtgcctggcggccagcagggcggggcaggaggctgggagagggacgggtgcgggggtgggggagaggaagggagcggtcacgtgtgaggggcggcccgaggtcacgtgacggagcgccggagcggagggagccggggctgggagttctcctgagggaagaggagtggagtaggggggacgcggcggcggcgttgacaatggtgagtgcgcggcggccagcgcgctcgcctcccgccctcgtcccggagcgcgcggcgggccggccaaccgcgggccgggcgtcgccggaggaggggacgggggagcagggcggggagcggggttaggcctgtcgggccacccctgggtctgggaaaagctggcggcgccacctcttcccggtctcggcgaggcccgagcacctacgggcggcggcgtgctctcctggccatgtcggagcctctgcccgcgttcttcgactgcttgttggggctctggctggggactcggaccccgcctctgcgggggctggtcgccg

SEQ ID NO: 10781 - DNA, 1024 bp, Homo sapiens
ccgggagggcgcagcgcccgggtggggagcccgagccagcccaggccggctctggcctcctgacccagacagcgcagggcgcgagggatcgcgcggccgagcccgggtcgcgccgctcccagcatcggggccgctagccaagagttcgaggccttcccgatccggatgtgatgaaaaagagcaacagagggagaagtgtttcaggattgtaggagtggaagaggggaaagagaggcagagagggggaaggccccctcgcaggggagccggctggagtgagctggctggaaagagggggcggagtgcgcggagtcagagccgccaccgctgccgcagttgccgccactgcggcgtctgggctgagccggagggaggcgggaggacgcgcaggggcggccgccgccgtcgtcaggccaccggggcgaaaatgcggccgctgccggaggctcgctaactttccggggcggaagaggaggaggaggaggaggaaggggcttggagcgactacggggggatgcggaggtaggtagtggtctccgggcggggaagaggaggggtttgatccccatccccggggttctcccaaacccgatctctctttccagcccctccccgctgggtccacctcggacccctgggaccccgccgctgtcaacttgcgctgtaacagttttcttcgcaagtttcaaatcaaaacttccccggggtggagtttgagggagggaagtggagggggagggaacgtcccgcaggggtggtgtgctcttctctaaaaacatttttttttttaattttgtatatttttccgccagaagcagtcagttccctgcacccagcacctcacagcccttcctccgtgcgccctgccgggcggcgagctaggcggcagcggcgcggcgcgggctcggcggagcggcccatgtccggcgcgggcgaagccctcgctcccgggcccgtggggccgcagcgcgtggccgaggcgggcggcggccagctgggctccacagcccagggtgagtgcgcg

SEQ ID NO: 10782 - DNA, 1339 bp, Homo sapiens
ccgcctccagcgcccccaggcccatttcccgcagaccctccccgggccgccctcccctgccctactctaggcgctccctctccctcgcagccacaccgtggctgcactcgccgtcctctcttccggccgctaccaccccggccccctagaaccccagcctcccgcgcccgcagccgcgttcctgtctccccgacctccgcacccccacttggcccggcctcctcgccttcctcccggctcctcccctcaggacacctgtgtcgtcccaccccctccaccacacacgcaccccccaccccaattccttcgcctccctgtcctccctcccccgccggtctcccctccccgctgctgccccgagagcccgatgtgggagggaaggcgcgggggaggggaggccgcgaagggggctgcttttctccgggttccccgtgctgcggaactgcagggctccccagcgccctctgccttcttcgccggcggcgcggaagtcggggtctcccggacgcccccgatgagggtatttaccttcttgccggggacactttgcagacggctccaacattggcaaacactacagagaactgaccccgctcggccgccgccggcttccacccctcgggctccccgccccccgcctccgcccgcctccgcccgcctccccggcgctcccgccgcgccctcccgcgctcgcgccgcgcgcccccgcctgcgcagccgctcccgcgccccagcacgcccggccggcgcgcgcgcccggcaccggctctacctccactccgcctcccgccggcccgcgaccaagcgcggccattgttcgcgacgcagctcccgccccctggcggctgccgggccccagcagctgcaggctctgcggggctagcggcggcgagctgggcccctgggcgagggccattcccggggggcttgggcacgcgggcgagcgactgcgcaaggagcgcgcccggtccgcagtctcctcgtccccggcgcgactccccgccccctcgtctgccaagggtgggcctggggcagccccttccacacctgcaactcggcaacttccttccccgcccgactgaccgtctgctctttctggtccgcaccctgtgctctgattccccgctcgtacctttcccaggctctccggctgcccctctgtgctgtgcaggggacgcgcgaccatcccgcgtctgctccggccgccgctgtgcaacgcacggtttagcggatcttgcacctttctagacgggggagggggcggggaggaggttgcttcaccgtctcgcccagcaaacaccagggatccgtgatcacctgctcgccaagacccgcggcg

SEQ ID NO: 10783 - DNA, 2273 bp, Homo sapiens
acgcggtggcactggtggctgccggcagctgtcgtctgcagagtgggtgagaccgagtgtggcagatggcttggtccgcggtgctggaggggactggcggagcagaagcgccctggcgccgggtccttgctttcctggagctggggcttggggaatggggtcggtcattgcagggacagaggagagggcagggtaatgggtgcgcaggggtcccttccaaaggctgcgggtggccaggggtgtgcgggggcgctgaggtgcggtcgccgagagattctggcctccagggtggtcgggcctggcatggactctaggggatggtgcacacaccggaccggacgggcccctcccttacccccggatcccccggctgggcagcggccagggagaggggcgacctacgggggcgggtgtggggacgccggactacgcgtcaggagtcccagatgggcccagacccccattccccgccccgggccgcagtgacgtcagggcccggacgttcccggaacggcctcttgggggcgttccagccccacggacccgcagggagtccccgccgcaatttgcatggggctcatttgcatgaccccgccccgcgcgggagtcgggggcgccggcgactggaggagccactgtcaatccccaggggaaagtgggcgaggcgatttctgggccgctcacctcactccaccctccagctcgcgccgcacctggggccctcccccacctacgccccgccagggcggggccgcgggcgcagacactcgcgggcacacgcacgacgacgcgcacacgcggtcgcacgcggccccccgagccccctgcggcgactccgattcacccccgcgggtgcggggcgcggacccgcccggcccagctcctgctccccaggcgcttcctcctcccgcgacctgccccggccgcacccgcctccgctccagcacgcgacgctgcccggcgcgacccctgctcccccggcccagccccaccgctgccctcgactcaatcccagttgaacgcccgcagcctcagtcccacccccggcccagccccagcgcccccagtcccacccccggccccagcttcagcctcagcgcccccaggcccagccccagtcccacccccagtcccaacaccttcaggcccaccctcggccccagcctcagccaccccagccccagtcccggcccagccccagccccagcgctcccggccccgggcccagccccagccccagccccagccgagcacccccggccccgcctgcccggcgttcccttttgtgcggcgctctcccgtccgcatccgcccgatcctctggaactccccgcggacgccggggtccctggaggcggcttcctttgtctctgctcccgccctccctccgcggcgtcttcgcccctcactcacctccccagccccgcggggacgaggggagctggagggagcccgggacccggcgcggcctccgcaggcggcgctttcttctcgctcccgacgcggccgcccctcctgcctgcccgctcctatcgccgcttccgcctctgccggggacggggacagcagaccctcggcgcccggcccccgcgcacctgccgcgcgcaccgcctctccggcctgcgcggctccgggggctccgggaagaccgagcgctggcggccagcccggggaggctgtgggcagcaggggtggctgcgggctcccagtccctcctccgcctacctcggagcccacatttgggatttctactccgggagaattctgccctcctcccacgatgagcctggaggactggagccgggacctggcacccccagggctgtgactgggtgaactctgagggcacagctgctgtccgccgccccaggggtcccaggatggggcgagcagccctgaagaggcccaagggcaccccgtgaggagcccccacgctctgagagtggggcgcagagccggagccccgggccatgcctccgctgccgctggcgcgggacacccggcagccgcctggcgcctccctgctggtgcgaggcttcatggtgccctgcaacgcctgcctgatcctgctggccaccgccacgctcggcttcgcggtgctgctgttcctcaacaactgtaggtggccgcgggcggggcgtcgcactggccaagccccaaccccgaggcccctgcacatagaggctggaggccgcggcgggtccgcggggctcccggcagcttcccggggatgggatgggtcactctgcggacccctcggtccctggaggccg

SEQ ID NO: 10784 - DNA, 5586 bp, Homo sapiens
gcgccggctgctggggctgccaggtgccaggagacgcctccctcgggcctgccccggcgcccgccctcaccggcgtctgtcctgccgcccagctacaggcctcgggcctccccggcagcgcggagctgacggtgggcgcggcggtcgcctgcttcctggcgctggagggcgccgacgtgagctacaccaaccaccgcggtcggagcccgctggacctggccgccgagggtcgcgtgctcaaggcccttcagggctgcgcccagcgcttccggtgagtccgtggacggcggggatggggtccggcggcctccgggcccctctcaagccgcctcctccccctgcagggagcggcaggcgggcgggggcgcggccccgggccccaggcaaacgctcgggacccccaacaccgtgacgaacctgcacgtgggcgccgcgccggggcccgaggccgctgagtgcctggtgtgctccgagctggcgctgctggtgctgttctcgccgtgccagcaccgcaccgtgtgtgagggtgagtggggggccccggggtggggaggcccggctagtagggccgcagccaaccgcgctctcctcttcgcagagtgcgcgcgcaggatgaagaagtgcatcaggtgccaggtggtcgtcagcaagaaactgcgcccaggtgggtgaggctctgcgcccccaacacgcctcctgctcagctggtggcccgcgggtccccgtcccccaccccttccctcccacacttccgcccatggcccttccccaggttacaccccgccctcccaaggctcacacccggccccccagcccccagcccccagccccgcctgctccagatcacacccggcccacagccccgcctcaaggtaacaccctcctcccccatcacaccccagccccgctggatttcacggcccctcccagatcacactccctccatagccccaccccagatcacagcccacccagagcaccgcccccccatcacaccccggcccagctcacagcccacctgcagccctgactccagcccgcacaccaccttatgcctgatttccacggctcacctcctgcccgcacccgggccccacctctgcctccaaatcacccaccccgccagccccccttgcaggtcacaacccgtcccaggtgacaccccgcccccagcctcgcccccccgcagctccctgctccccgcattcccccacccggcctcccagctcacacccgtcccccaccccgcagacggctctgaggtggcgagcgccgcccccgcccccggcccgccgcgccagctggtggaggagctgcagagccgctaccggcagatggaggaacgcatcacctgccccatctgcatcgacagccacatccgcctcgtgttccagtgcggccacggcgcatgcgccccctgcggctccgcgctcagcgcctgccccatctgccgccagcccatccgcgaccgcatccagatcttcgtgtgagccgcgccgtccgccgcgcccgagctgccttcgcgtgcccccgccctgtgttttataaaaagaaagattctcggacgttgcctctgctgtctgcctgggggaccgggcgcctctggggtcctcccctcgggacacgcgggcgagcctgggggcgaggagggggggcccttccctgggtccgccccgcccgccccaggctctcgggtccagactcccgcccggactgcggccttcgggccaggacacccttcaggcgcgggcacggccgcctcccgccccccaggcccgggtccgacggggcggggactcctgtgtctgcccccgggcccccctcgctcttccgtcctgggggcggccgcggggactcgcgctctgatccaaggggcccgacactccccagggctgtggggtcccgtcccagcagggagttagttggggggcgtcccaggcagggtctgggggccgggcgcacgcaggcggggtgacgagctgggggggcggggggcggtgtcggagcaaatacggcggccaggcccagcctctcgcgctttccaagaaccgcccgcggccgccgccagctgcttggcgctgaccccgttggccgggctgccgtcaccctgggcccgacgccggcgcggaaaacggggagggacgagacagacacaggccggtctggctcggaatctcctgctcctctgcccaatcccccacccccgccccgcgggacgccggtgcccggtctcggtcccagcccagagccgctcgcgcctggacgccggccgccccgtcgaacctttgggtctccgagctccccgcccccgcccccaatcaggaccggtccagacctccaggcccggcgcttagctccgtttcccgtccctcccgtctccctctcccctttgctggggcctagccggggatttaggagccacacaccctccacctcacgcgctaccctccacggggcttcccgcagccagggcccgccccttcccggctccccgggagaccctggcaagttccctccctccgccccgcaacctggcaccctccgcggcccttgcctacccacgcaccccctccccgcctccccctccaccgccccatactcactgccacgtccccatccggccatcccctcccagctctcggggacactgtcaggcgagcgacgcgtctcctgcggcccagctcagctgcctgggccaggatggagactccgctcatgtggggctcaggggttttttgaggattccatttgggaaaaaagccaccagatcactcactgcccagcagtgggggcttggggacccccactgctaccctttcctaagcgggagccctggcgctgcccttcccgggctgcctggggccctcttcgctcccccctccgaggaccccgcccagcaggccatgcccaggcctctgcccctggcccacgggacgcgggtccccatgcccccggctggagacagcaggcagctcggccaacggacgggccagctggttcccttcaggggcagccttgccccctctcccgccccgtctccctcccccccaccacaccgggctgtaacccgagccgccgagccactgcctcccctccggatcctccccggaggctctgcggcccgggcccccgcgccttgctgccccatgcagccctgagccccacagcaagtctgccatgggccgcggggcccgtgtcccctcggaggccccgggggcaggcgtcgagcgccgctggcttggagccgcgctggtcgccctgtgcctcctccccgcgctggtgctgctggcccggctgggggccccggcggtgccggcctggagcgcagcgcaggtgagcggcgggggggaggccaggtgccgggttgggggggtcctcacgtctgtgggtctggtctatcggggggcccgcaggacgtgtgcggggtgtgcggggtgtttgagggtccggatgtgcgtcccgaggtcggagggttggacgcccctgtgtccagttgttgggaggggtgggaggcctcgccctgctgttcagccccttcccctccactgggccgcgttcccagggacgtgcaacagggcgctcaggttaggagacccgaaaccacaggcagacaggacccgccacgcccgctcccagccctgggcacccccacccccgtttccttccagtccattttccgcggcagtttttggtcctggggaccgtcaccgatgcctcccacgcacgctttcttccctgaagggagacgtcgctgcgctgggcctctcggcggtcccccccacccgggtcccgggcccactggccccccgcagacgccgctacacgctgactccagccaggctgcgctgggaccacttcaacctcacctacaggtgcgccctggctgggccccgggggagggggcgcggccggcgcccgctgagctcactctccctgcaggatcctctccttcccgcggaacctgctgagcccgcgggagacgcggcgggccctagctgccgccttccgcatgtggagcgacgtgtcccccttcagcttccgcgaggtggcccccgagcagcccagcgacctccggataggtgggcgcccgcccccgccccggcccggccctgcgcgcccggcctctcagccccgtgctccccccaggcttctacccgatcaaccacacggactgcctggtctccgcgctgcaccactgcttcgacggccccacgggggagctggcccacgccttcttccccccgcacggcggcatccacttcgacgacagcgagtactgggtcctgggccccacgcgctacagctggaagaaaggtgaccgtccaggctggcctcctggaggcctctcctctgcagcacagtgggctgccgcggtcgggctttggggcagacggcaggagggaccttccggggtggtggctgccactggagtctagcaggcaaggaggggagcccgtgggagcccccatcccggcagccctgaactccctttcccatccccctgcgcctctggagcgggagctggagctgcattcctgggggccgagctcaccgcctgggcccagaacattcttatctttccgtggctgcggccgagggcggctccgcggctgcgctccagcagatacaccgggcctcggggagctggcccacgggcggcggggctgggcccggggctcccaggcgctgacccccggggcccgcaggcgtgtggctcacggacctggtgcacgtggcggcccacgagatcggccacgcgctgggcctgatgcactcacaacacggccgggcgctcatgcacctgaacgccacgctgcgcggctggaaggcgttgtcccaggacgagctgtgggggctgcaccggctctacggtgagtccctttgtcgggcgggagggcggggaccgggcggtcctgagccaggccgtgctccccacgctcccgacaggatgcctcgacaggctgttcgtgtgcgcgtcctgggcgcggaggggcttctgcgacgctcgccggcggctcatgaagaggctctgccccagcagctgcgacttctgctacggtgatgcccacggggccgggacagggctgcgtgggagctgggccttggccatggtcggggctgagggggcactgacggggctctttcccccacccggagcagaattccccttccccacggtggccaccaccccaccgccccccaggaccaaaaccaggctggtgcccgagggcaggaacgtgaccttccgctgcggccagaagatcctccacaagaaagggaaagtgtagtgagtgagcgccccgggcggtcctcggggtgggcagcccgcgggcggccttggggcaggggtgcggggcaggcagcggggggggctgtgcctgcaggagacgccccgcccccctgcagctggtacaaggaccaggagcccctggagttctcctaccccggctacctggccctgggcgaggcgcacctgagcatcatcgccaacgccgtcaatgagggcacctacacctgcgtggtgcgccgccagcagcgcgtgctgaccacctactcctggcgagtccgtgtgcggggctgagcccg

SEQ ID NO: 10785 - DNA, 1264 bp, Homo sapiens
gcgcggctcgggcgcagttccggcgcagtccccgcgccgagcggctccgcgccccgcaccagcctctgcccggctccgggtgacgtcgcatcctccgattggaccacgcggcctggggggcggggtctggtccggtgagctcaccgccgcgccccgccattggtccgggcggcgcactcgggcagtggcggggagaccgcggtacccggagccccgcgagtcgttccagctgcggcgagtggagctgagcgggcgcggggccgggctgggccgggccgggcggggccgggcggggcgcgggagccagtgagcggcggctcggcgcaagcctgacgagcaggagccgagctcagcaggtccgggtaggtgcgcggcggcgcggggctaggcggagggcgcgtgcggtcgagggcggcggccggcgggggcgcgcgcggggcgggggcggggccggggcgtggggacacgcgtgctcgcgggccgggggcgtggtgcgcggccacgcgtgtttctggcgcgagtgtgcggggccaggccgggagggcgtgcgcggaccgggcgtgtttacgcgcggcagggaggggccacgagggtgcgcgcgtttctggcgcgagtgggaagtgtggggatccggcgggcccggtgtgaggggcgtgtttctggggcgagagtggggagtgagtgtgaggagcaagggtgaggggctgcagggaggggtgcgtttggccgaggagtgggtgggagacacgcgtgtccatgccgcgagggtgtgtcgacgcccgagcctgcgtggggcccggggccgtgtgtctggagtggccgagggcgtgaggggcgcgcgtgtttgtgcgaggggcgtgtgcggcgggtgtgagccacgcgtgtctgggtgcgcgcgcgggccggatgagcttctggagtggtgcgaggacgcgcgcgtgtgtctgtgtcggagcgagggcggggacgagcgtgtcgggcgcgcgcgggcggggctggggcggcgtcggggcgcgcgggggcccggcccggccggcggcgagtgtgttggggcgctcggcttctcctcaacacgggtttttgggacccagtgccgcctccttcccgcggcggggcccgcggagctcccggtttccctgggcagacaggtgcgaggcgaggtgcgggcacagccctgcgctcctcagcgggtgcgggatcgggcgacgggggactgtctctaactacagaccaggggagcggagggacgctcgattcacccgcg

SEQ ID NO: 10786 - DNA, 716 bp, Homo sapiens
ccgcttccgcggggcgggaatcccgcgccccctccccccgagcctcaccttttatggtaaagcggcgcggggcggcggggcggagggagccgagggggcggggagggcggacgggcggaggggacgggaggcccagcggctccgggctccgctggctcgggcgtcggatcggagccgccggggcgcgggcggcccaggtaagcgggccgggtgggtgggggtcgcgtccctccgtccctgtccccggtgcacacaggtgacagcgccggcagtgctcggccggagcctgctcggtcgccagccgggacccccggcgcggcgcccctggaggggcctgcgggtggggggtgcggtcctcacgccctttgcgtcccagtctcttggtctctctccccggagtcggggagtcggcaggtccggggcgagggctcagtgaggccggcggagggccgagtcccagcccgggagcgggagccggggacccggcgcgcagggcggaagctcccgcacaaaaggccggagtcccgcacatggatcgaattaaagctccggcggcgcccagcggtgaccccggcggccgccctgctcggctgcctgcggagggtcccgcgtttccggagcccgggggcgctccaggccccttttcctagccagggtcaggcaaggggagggacgggtcccggggctgctcctctctgggcctcacgcgcccgtcg

SEQ ID NO: 10787 - DNA, 619 bp, Homo sapiens
ccgtccgggactcggggggaggcgcgctgggtggtccggcagccgggggcgggcggtagcctgcaggcgtaattggcatgcacgccgttgtagctgagaccgcttaataaagcattacatatctcaccgcttccatatttcattacctcacgcggagcctgtgagagggccctaatgggagtcagctgtgtttttactttctgttgtcggccgggacgggtttctctgcggattctttgaaatgaaataatgtgatgcacgccgcgataagggccggcctgtaatgaggcccaggccgccgggcggctgctattgctccaggtgtcgcgtatttgggctgcgaggacaaggaggaggagggggcggcgccggaggatcgggggggagggggaagtcgcgaggggcagggggtgggagaaggcggagggaggaggcagggggcagggggcgggcggaagaggggaggaaggagggggcggcgggccgcggcaggccaggcgggagaagccggagacagagagaggacggggacagtggcggcctgcagagccctaggaacccgggttcaaatcctgcccgccagcgtgagagagcgtttgcccgcccaggcggtccaccg

SEQ ID NO: 10788 - DNA, 293 bp, Homo sapiens
gcggctccggcaggggctgctgcggcgactcaggctgctgcggctccagctccaccagttgctgctgcttcccaaggagacgccgccgacagcggagtagtggttgctgctgctgcgggggcggcagccagaggtcccagcgctccaacaaccggagctcaggatgctgctccggctgctgagaggcccgcaacccccagcgctgcgctagagaaacccgcccagcccagagcgggcccgccccgctgcggctcccacgcggggctgggcctcggagtttgccccgtaaagcg

SEQ ID NO: 10789 - DNA, 2748 bp, Homo sapiens
acggcagggggtccccgtgccctccgagaatccaagaacccgccccgcttctacgcggaaagctgggagaaaaactgcttttcctttatttccccctaccccccactcatccgcccctggagctccgctcgcagatacctccccctcccgagccagaaatagacacactatctctcccccacctccctccccgtgcgcacactcgctcccctcctcctgtttgctccccgccttccccttccctccttcctctgctcggagctgcagcctgcagcctcgactcgggctggctggctggctgagtgcggccggggcgctgcccggcagtgcggtgtccacgggactgacaggcaggcaggccgcgggctgggatccggacaccaaagcaaaagcaccgctgggcgccggaggagccgcggggcttccatccttcctttgactgatttttaaattttaatttgtattttccccgccgccccgccccttttcctccgaccccgccctatcgctccccggcttccctgctctttcctttttcccggcttccttcctcgcgtttctttcccctgcgccctcggcttgcctctctccctcctccctcgctctctcccccttctctccccttcttcctcggtttcttccgtcctctctctccccctcctcctcccccgcctcctcctcctgcgctcccgccccctgccccctccccccgtgcctgcagacgcgcggatcgtccatgcgctcctcgcgggcagaatgctgggcagcagcgtcaagagcgtgcagcccgaggtggagctgagcagcggcggcggcgacgagggcgcggacgaaccgcggggcgccggcaggaaggcggcagcggcggacggcagaggcatgctgcccaagcgcgccaaggcgcccggcggcggcggcggcatggccaaggccagcgcggctgagctgaaggtcttcaagtccggcagcgtggacagccgtgtccccggcgggccgcccgcctccaacctgcgcaagcagaagtcactcaccaacctctcttttctcacggactccgagaaaaagctgcagctttatgagcccgaatggagcgacgatatggccaaggcgcccaaaggcttaggcaaggtggggtccaagggccgtgaagctccgctgatgtccaagacgctgtccaagtcggagcactcgctcttccaggccaagggcagcccggcgggcggcgccaagacccccctggctccgctcgcgcccaacctgggaaagccgagccggatccctcgaggaccctatgcggaggtcaagccgctcagcaaggcgcctgaagcggccgtgagcgaagatggcaaatcggacgacgagctgctctccagcaaggccaaggcgcaaaagagctctgggcctgtcccctctgccaagggccaggaggagcgcgccttcctcaaggtggaccccgagctggtggtgaccgtgctgggagacctggagcagctgctcttcagccagatgctgggtaagtcctgccgccccgccccgccccgcccctggctttctcctaaccagctgctggggaaggtgtggggaaagcgaagccccctccccttgcgccttcccggagggccctcctgttcacgatcaggctgtgatgggcattgcgcccagatgtgctgagctggcccacctccagatgcgcatggctcaagtgtaccttcttaaagacattacaggcgggaacccgggctcgactctggcctgcccgaggtgaggctggacaatgggatggggggtgagggggttacaggctctcagaaatagagccagaatcccaatatggcaaaacctgggactggtggaaacctccgttgtggtgtggcctgcgcttgacaggagcatcccgcattgcaaggggagcgtccagcgagagcccggatctagaggacagatgtgggagagcagatgtgagggctgattggccccggaacacagctgaggctccacttcctctgtggatcccgagtgggagcgcaagtcggatttccccgcggtgtgaggattctggctaaaagaagcgtctagggccgggggcgggcgggctgccagctgtgcgcatctgggcgcatgtccgatacctcagccccggctctggccccaacccctacacccgcaggtcttttagggcgtgtcgaaagctctgggcgttagcgccgagactcctgtttgaccgggaagcctttgccctgtggctaatggaagccgagcaggcgggaagggaggaacaaagcttgctcgagtggaggaagcgcgcagagctgttccattgttctccgtgcctgaagagtctatgcaaaaaaacccgaagcgggccccggaactgctctttctctccccggagagcccctgccctcagagaggaatagatctgggatgtgccggacgccaggcggccatgcctcgggaactggcacgggccctcttggggccacggaacaaggacggtggggcctggtgcccaggcgagctgctttggctgcgcggacttgttgcggtggctgggttgtgggtcctccggcgccgagggacccgagcttcctgggtacccggcaggctgcccgcccgctgggggctgggaaggggcgtgccaatgcgcgtgtgaaagggcggggccgagtgacgggcttggcgggtggggaacatgcaagagctcgccgggcggccctggagaatgcgaagccggaggagaccggttcg

SEQ ID NO: 10790 - DNA, 433 bp, Homo sapiens
ccgtcccggcgctcccaccgccgccgccgccgcccaatagagcccctggggcggtccccaccgacggtgcagcccgccgggaccgggaggaagcagctgcggccatcgcgccgtgcgtccgcgcccggccgccaggtgccccagtagcccgaccgccgagatgcccagcccgccggggctccgggcgctatggctttgcgccgcgctgtgcgcttcccggagggccggcggcgccccccagcccggcccggggcccaccgcctgcccggccccctgccactgccaggaggacggcatcatgctgtctgccgactgctctgagctcgggctgtccgccgttccgggggacctggaccccctgacggcttacctgtgagtactgcccgcctgtccccgcctggtcctgcgggctgctggctagcgcccagtcccg

SEQ ID NO: 10791 - DNA, 1376 bp, Homo sapiens
ccggcaccggggctgcactcctgggcagacgctgcatgcctgtcctcaggcgcggccctgctgccacccccttgggggctcggagcgcgacagcagcttggggacgcctcccgcgcccagcacggtgcacctgggccctgaggtcctggccgaaacgcgccaagttgggggtaggtgcagcgaccccatacccctcggctgcgcgccctggcggcaggaggcggggccgggggcggggcgtgagctggccggggcggggcctatggaggggcgggaccgcggcgccctataagtactgcggagcgaggcgcgcgcccggccagagagcgagcgcgcaacggcggcgacggcggcgaccccaccgcgcatcctgccaggcctccggcgcccagcgccccacgcgcccccgcgcccccgcgcccccgcgcccctttcttcgcgcccccgcccctcggcccgccaggcccccttgccggccacccgccaggccccgcgccggcccgcccgccgcccaggaccggcccgcgccccgcaggccgcccgccgcccgcgccgccatgggagtggagggctgcaccaagtgcatcaagtacctgctcttcgtcttcaatttcgtcttctgggtaagggctgcgccgggggccggggcgggagggggcaggcacacactccacgttgggcaggtcccgcggcagcgtgctaggccccgcgggcgcagcgcgggccgcgaagttgtggggccacctgtgggctccaggagcggggtggggggtcgcccggggccaccgcgccccccgacattggggctgagggctgcgagccgagtttcggggcctctgtgctcgggggcccacctctgcggccgggccggggcttctgggggccgccgggcagttcccgctgtggtggtgatgggtgcggtggtcgcgggtcgggacccgagtacccggccgcccctcagctaaggaggggcctgcgcgggtccctggccgcggattccggactgctgcttcgcggggacgaggggggggctcgcgggcgggactcctggcgccccgcccccatgagctcatcaagagccgccgcccctggatggtggggcgggggcgcacactttgccggaggttgggggcgatccgcctcactctttccccagcccagctcactctccaatctgcggtcaccacccgagaccttcctgggggtcgcgcctaaaaggagcgcagactcccgccgggatggcccagaagctggggtgcgcgcaccctggccgtccctgcctgggagccgatctccctctcctcacccagacacgttccagcggaggcctcctcccagaagggctctggaggcctcgcaggagtggggatcccgcg

SEQ ID NO: 10792 - DNA, 3393 bp, Homo sapiens
gcgggtgcacagggagcgccaggactccagcgtcttgccggaccagacccacacgcccgaggtgatgcccaccactaggcacatgaagtacttgagcatgaagacggcgtagtcgggcctgcgtgcctggtcgggctgcaggtcccgcaggcacgggcagttgtgcgtggcctcccagcgcgggcggttgtgctgctcgtagaagaggcaggcgaccaccaccgcggcgggcacggtgtagagcacggtgaacaggcccaggcggatcatcagcttctccagcttgtgcgtcttggtggggccgtcctgttgcttgatgaccgagcggatgcggaagagggacacgaagccggccagcaggaacatggtgccgatgaagaggtagatgaccagcggcgccagcacgaagccgcgcaggttgtccaggctctggttgcccacgtagcagatgcccgccaccgggtcgccgtccaccgagctgagcgccagcaccgcgatggacttgacgctgggcacaagccacgcggccaggtggaagtactgcgagtagccggcgatggcttcgttgccccacttcataccggccgccaggaaccatgtgagcgacaagatcacccaccagatggagctggccatgccgaagaagtagaccagcaagaagaccacggtgcacagcgcggggccggtggtctcgtagcgcacgtgctgctccaccgcgcccagctcctcgtactcgccgcgcccgcccgggccgcccgcgcccgcgcccgccgcgcccgcgcccgccgccgcgccgcccgcgcccccagcgccccccgcgcccggcgcgccaccgctgcacgccaccttctcgtggcccgccaccaggcgcactaggtagcccaccgacacgaagaggtagcaggccgagaggaagataatgggccgctccgggtacttgaagcgctccatgtcgataaggaaggtggagacggtggcgaaggtggacacgaagcagagcaccgaccacaggccgatccagaagacggtgaaggcgcgctcgtcctggctgaaaaaggggttgtggcagggcagcgcgcagttagcgatctggcctgtcttgacgcggttgtagagcgggtggcgctcgctggacacgctcaccataggcgcgcggcactggcacccgggctcgcagggagccgcgccgccgccagggggccgcgccttcccgccaccgccgccgccgcgagctgggggcgccgccgcgtccccgccgccaccgcccctgccgccgccgcggtgcgggggcctggcccccggcgggcggccgtggccgctgcccgaaggcggctgctcgccgggcggcggcggcggcaggcggcgcggcgggctgggcgcggcggtggttaggtcggtgcggttgtagtccatgcacagcgtgtcagggttgccttgctcgggcagccggtcgcagcgcatgcggtcgggccaggcgaagccgtactggcgcatgagcggcgcgcagccggccttggcgcgctcgcacaccgagcggcagggcggcagcggcttcttgtagtcctctaggcagatgggcgtgtacatgctgcacaggaagaacttgagatcgggcgagcactggatctccaccagcggccagaactggtgcacctccaggcccgcctcgtcttgcgtgtcgtggttgaactgattgggcatgtaggtgtagttgtagccgatgcccttacacagcggcacggtgatctcttggcatgccagctccttggccgaggcggccgcagcgccgctagagcgctgcagcagcgccaaggcggccagcagcgaggtcacttccaacaggtaaccccactccatgctgtgcgcctcggcccggtgccctcgccctccaggcggcgcgcagaggggtgccggggggggggcccacgagagagccgcagacgggtacagcgggtgatctggggtctcccttatgcttcgcccgggaggggggtctgccgataatctaaccccttctaggggcgcgtccgcagcggcgcggcccgcagcctgggcagggcccttccgcactcctttccgccgctccgggggtttgaaggcggctgcaggcgcgcgccacagtccgtaggtccgctctgctggccccgggtcgcgctcagccctcgcggcgcagagcggccgggcctcggctcatcgtcccgcgctcgctcgcctcctctccgcgcgcccgaccacttctccccgccgcgccgggcggcggtgactccgccggacagagagggcggaggcgccgcaagtttcctctggggccgcggtgcgcagtcaagatggctgggccgggccgcttgccgcgccgggtcagccctggcggccaccactcggcccccgggggctcatgcccgcccccaaggccaagccgccgccgccgccgccggagttggggacccgcctcggcccaggccgccgccctctttctccggcgtccgtccttcgtccgtccgccgccgggacagacggacccccgccgcctggaaaagtcagcgccgcgctccggccgcagtcgggcgaggtgcacacagtctccttcctgctggacacccaggagcaaatccagaccggaaggcggagcggacacctgagtggcgcggcccgcgcccagccgccgcctcctcctcggcgggagcagcgcccttagcccaacttcccggctccagccccgctcgcgccgcgctgccggctcatgaatatttatacagcgcggactcggtctccgcccccagccccgcgagccaatcgccgggcggtagggcggagtccacgcgctcccagggctcagccttccttaaggcagtccccgagtgtccgcactgctgtgcgcgctctctgcggatggagagttttggtaaccttgggattgaccgcagagacagagtgttggccatggctgtccccatggcgctgagtgcgtcggaggtcttggtccccttaccccgagtctgcccttggggacagggacggggtttggtgcagcgcgcgcctccccggcgcgtttcaaaccagccaagcccctgctgccaccctccgcaaatgtgggtgatctgcaggcggctggggtctcgtgctcctcggggcggcaggaaggtctcgcagcaggcgagcgccggggaggcctgccggggctcggcgctgcagaagacccgggaaagggtgtcctccttggggttctcagaacgatggtttctgagacttggagatgtggggggtgtggagtcattctaaactggggctggacccgggacggcccgggtgagatgccccggagcccagccttgggcgcgcgaggggcgcgggggacaaatgcccgccagagactctcctcccgcctccgctgcg

SEQ ID NO: 10793 - DNA, 1381 bp, Homo sapiens
ccgcggcagcgccagctgcacttctttccaaaaatcggaggaaggagtctgggggccaggtcggggcggtttgcaggtgtgaacacctcggaagcccctggcgtcctggcccccaagagcacacctgcggctgcccacgggttccacgccctgcgacagctattccgtggctccgggggcctcaagggcggctccccgcatcggggccccaggcagcggaacctccccccagggcccattcacaaagcgtggtgccgcagagctccccacggaggggtcccagcctggagcccgggcaccgcccatctctaacccgccgctagccccggaccctcccgcgcctgctccgcaccacggagccgggcctccagagcagcaaggtcaccaggtggcggtgctggcgcagcaggcggagcgccgggtgcgcggggtcgcgcctctggccctcgaaggtgatgaagatgggtctgcgggtgagctccagcagccggcacaggccctccctgcggggcgggaccgtcaggggggtgggtgctacgctggggcccacccaaccccgcgcgggacccaccggaagctgtggctgcaccaggcccggctcaggaaggcgtccgaaagcaccacgatgaggcgtcggcagcggctcaggttcaccaagaggtcggcggagggctctgcgggagggcgggcgtcggcggcgcaggggcgggggcgggggagggcggggccggaggctcaggggcggtgccggacgcagagctctaagggaggggcggggcctgcggggtgggcgggtttttgaggcggggcctcgggtgggcggggatgggggcggagctcgatggtgggggtggggccccgggtgggacggagcatggggcggggcggggcgggccctccgggtgggcggggcacggggtggggcccgggataccagcgcgcggcaggaggtcgcggtcgtccaggaagagcttgtagccccgacgccgctccagctgcggctttaggatgaagttcacgaacttgcggtcctcggggcagtcgctgtaggagacgtaggcgtcgtagagcttcccgtctgcggacggcggccagtcaccccgatggctcccgaggcctcacaccagccctcggggtccccaacacccctaaccatctcccacgtgcacaggggcagacccgccccggactttaaccccagccgggccgcacagagcacccgggggctaacccctccccgccgcacgcctccaaagccgagctcagcagcgcactctcagggaggccgtggcgacccctcctcgcgcccacgcgggccccacgcaccgtttatctccacctccccatacgcgtcctggtaccagagcagcacgttgagacg

SEQ ID NO: 10794 - DNA, 493 bp, Homo sapiens
ccggacccgggggaaatggggtaccaacggctgggccccaggagacactcggaggggtccgcgggctcggcccggtccctccgctggggggttaccagccggccggcagcgagatacccagaggcccgtttttccaccgcgttgccatagcaacggcctggccggctgcgccccgggccgcccgccccatcccgcgggcccgccctgagccagtgactccagggaccactcaccgcggccggcggactggcgggtctccgacaggtgcgcacactcggcgcaggctgtcgctgagcccggaattctgcaccgggagaaacttttcagcccgcagagcaaccgcagggcagtggacgggggccgcgcgaggacaaacagcggcggcgggtgcaaagccccttctccaagccgcggggttggccgggaggtgccggctgcacaacggcgcccacgtgacccaggtgcagccccaggcgcgcccaagggcagctcg

SEQ ID NO: 10795 - DNA, 922 bp, Homo sapiens
tcgcgggcgctctgcagggatggagattgagagaggccagggacccggctcccttgggaaaacgcgcgggcgccctagctccccgctctgcggcatctcacctgcccccgaggaccatcgtcaagaagaggtttcgtcgtgtcactgacacctcaccccgcctcctcccgcgaggtgcctccgagcccccgaggacgcggaacgccggggctccccgccgggcaagcatcagcatccagaccccgcacgcagccctgcacccccacgccctccagggaacgccggcccgcccgtccccgggacctcccgtcccctaagccaaggccccccaagcccagtgcccgcgcgccacccctccctccgaccctgcggcgggacccccacccccgcacctctccgcggggctggctaagcctccagacctcctgcgctgcagccggctcggaaagccacccccaggtcatccccccgcgcgcgcgcggcggcggctacggtggcggcggctgcgatccgaacgggcccctccatgcaccgcgcagggcagaggagggagcggcgcctcgcacgccggggctggggcgctgggcagggcgggcgggcgtggggtcccgggtctcctcgcacctagccgcgcgagccgggctcccgggctcaggggaggggagctgaggggcggagtcaccggggcgcgcccccgcggctgcgctcctccccgccggggagcgcgggcacgtaactcggagggtgctgggccggcccggagcacgcgagcagcgggaggagggaccggggaatgactgacggaggcgggccgtagaggccgctgtgccccgccggcccgcacccggccggagtgtgcgcgcgcagcctgccagatcagcggcgggggcacgggccgtaccaagtgacggaggggggcacg

SEQ ID NO: 10796 - DNA, 719 bp, Homo sapiens
ccgcctctctggcacccacggcgcccctgcttgcctctgtccgggtctcggaggcgcgaacaccatcccaagcctgcgaccgcgcggcatcacccccgcccttccccctcctccaccccgccctttctacccctcccgggagctcctgggagtcgggccgccgtgtgcgcaagcgtgtccagccccttccccgcccccaacccgggcccgggtccccgcctcccctgcaggcggactcgcccgctcccaggccggacccgcgcccgggacagggacccggccgagtcgagccgtcgcgccagcgctgcgccgccggtcggtgcgcctagcggatcggagctgcgcgcggaaccgtgctgccccgccccgctccacccgtgagggtgagtacgcggcggcggtgcgcgggggcccgcggggcggggcggggcggggagccgcggggtcctcggccgcctgaccccagccggcgccgcgcctcccggagggggtcgggccctgcacgtgggcgcagcgcgggtcggggtggggctgccacagccctgcggagctgctttccggggtccctttccctggaccagattttcgcgggaagccggatcctctccgttcccttggagtgagcaagcgggacagttctgcggaaagtttccgcccccaatcccccagccctgcgcccggactgaagcggcggcccccacctccagcatcctcgagcg

SEQ ID NO: 10797 - DNA, 958 bp, Homo sapiens
ccgcgctgtcagcatctcgcacagtccgcccgaaacaccagggaaggggttcgtaggtgtgggggtggggtggcgaggccaggcagcctggcgcgagggagagagccgaggcctgggccaggaaggcccttgggtgccgtgtgggcgcagagcccaggagagcgcactgccaggcccggacctccccgcccctaccccgggaagaggcccgttcgccgcagggggaaggcgggatcatagcacctcggaggagcggccggtccgggcatgcgggcggcggggcggggagggaggcttccggaaccccgagagagcacccgtgcctcgcgggccccgtgccccgtccccgggctccccttcctctaacgcaggggacccagcccggggcagtgccgggcactggcgctggcgccccgctcagccctgcgatccttctccgccccgcccctccccgctccgccccgcccctccccgctccgcccccgggccgccccgccccgcaggctcgccattcccgggcaggccccgccccctgtttccgctggcggcggcggcggcggcggtgccggagcgcgagcagagcggagacccccaggtcctgcgggcgcggtgagtgcggcccgggcggcgggcggcgaggcgggtctcgagagcgtgcggagtcgcgcggccttgagccggcgccgggcgggctgggcacccccaggccgagacccgagaagggggagcggccgggggcgcccacgggaggcagtgtgggcagggcggcggtgggacgagaggacgaggaacagagtaggcgccgtgcgggaagcgggccgggaaggggagggtgggtgcggggcccgggcaccgagcgaagtggggtcctccaggggatggctccgaggaagaccgtttcagaaagggagtaacccggggccggcaagggtttccgactgtgtgaccccgtgcaccg

SEQ ID NO: 10798 - DNA, 3843 bp, Homo sapiens
tcgtaactttgacgagaagggctcccccgctgaaagcccaactgcagagcgcccggagcgcgctgtgagtccgcaggaacgcggccgggccggggacgggagaaaggcgcggccgggaccctgcactgtgccgcgcggcgcttgcggctggaacttggcctggaacgcggtcttctcggctccagtttcccgcccaggccccgcccacccggccgccccgctggttcgcaccgctgctccggccaccgaggagcccaaagttggcggcgtcccgcggactccggcggagagcgcgagggagtcgcggccgactcctgtaccacgaagacaactggaggccggcgggggaggcgggccacgaggggctggggcgagggagctgggatgcgcgggcccggctcgccgggaaacaggttgccgcggagtcccgtcccctccccctctgcggtccccgccgcgacctgattcccgccctgcccggggagctaacccagccgcctccggggcgccctccttcttcctggattcccacggctggaccagagcccctctggcagccgggttaaaggctccttcagcaaggtcaaggcgcggccggctggcacctggggatttttttccagccgagcactggcttttcaatcgcattgttaaggatcatggcagcggcaggaaatccgaagggccccacaggtctgcgggagggaggatttattttacagcaaggaacagattcagacagatcggggatttcagtgggaggggacgagaggtttcaggacgctggaatgtggcaaaaacaaaacactccccacccatgcacatcaccatctcctgactgcgggctggggggaagggagttcagggccaatgtgtcccagacttcagcgttccccacggctgtgtcagggctggggtggcttatccccctacagacgaaaatcaagatttaaaagcatactcttactgtggtttctctatcaaagcccatcaacgtgatacacaggctgcggcgctggagggaagcggcgaaacggggagaataaacgcaacagaagcaaactgctgtctgcagaggcgagaggcgaaggaacggaagccatacccgaccccagccccatcccgtccccatcagcgccgggctagcgcaggaaaccaggaataggtgtaggtaagggtggcagcccggcagagccagcgttctactccctctaacccctcgccagcgtgggcctggatggctgggctgcctgggcatctccaagggggaccaggcaccgcgggcaggtttctaaacacgtgaagggcacagggcttgaaagacaaggaggggcgcccaggaagggcggaaaagaggggctttggggctccccaggacaccaagtcagtttctgaaaacggcgttccctggaaggccttccaacacctccgagggaagacttggagctctgaagacccaatgaaacctcagttctgactgactcctcctctgcgatcaattccggatgcccccacttagtccctgcctcggtaaccggttctttggggacagcagcatcagcacccgacgcccatcgcacaagtgggcgccgtggtgcgaggcgtatcctagctacccaggccggggtgggggcgccccggtacttacactccccaagcaggcaaactttcaggcttgtctttcgagaaccgggagctcgcatcacagttccgggtaatcaccgaggcagcttatgtaattgcccgcgatgccgctcagcagatctctctccttactcggcctcagagctcagtacatgggcaccctcttccccccaccccccaccccggcgattggaatcccgagcttgccccaccaccgccttctacaaagcagcggggtgatctcgtgtgctacaaacaccaagccagtatgcaggttcaggcaaaactctggctgcctccctgcgcccctttcactgcgtcgatggtttacagataactgcatttctataaaccctctctccacggttagggggtgggagggagttagagatcgggtgggggcttggcgcggtactgttgagggctctgcacccaactgagcagtaatacactcatccacatggacgcgggtgcataaatcgccttaacattttgccctgaaagcggagccaatttccaaagttaaggaccacgcagctgaatttccagtactttccaacctcgcctaggcgggggcaggcagagaaggggcgggcagcgggcagctaactcgcccgacccccccgccaagaaggactcactaggtgaaccccccgcccttcacccaagtagttggttgtgtattcctcggttgcgtgtgtgtgtccacacacacacacacacacacacacacacgccgccccactaccttccagtctgctcctccaatgtaacgaccgcatttaaaaatggcaattaaaatgactgaggagctcggtgatcacatttcaacccagagcacatttcccgaagctgggggtgagagtagtcatacagtcacactcacacccgggagccctccaagcgtccatctggcggctgcagcctcagttggctcctagacgaacatcaataccgcggccgggcgcccggtgaggagaggcgggcgccccgcgggttgcagagggcgaggagctggggtcgcatctccaggatctgagctccaaccaccgcccgtgcggggctgctgcagccggcacttgccccgcagggcaggctgcagccgctgaagcccggcgccgcctcgcgggctcctccagcgcccgacgggggcctggggcgagctagtctgcagaggggctgcaggcgaccgggccggggcggggaacgggatccgggagaggcagacgaacctggggcgcgccgcctccctcccacccgcttcccacctccctgccctcccccaacccttgctcccaggctccagtccgcggcgggctccgggggctgcggcggctccaggctccagaacagcttgcctcttcggccacccgcgccctagcctccctcctcctgggccaggggagcaagcaaacatctcccggagccctcggcagccgcgtgagctacccgaaccctgcccgggccagcagtgcagagggcgatggagctggcgaggcgtcgccgcggtccccaaggcgcttttccgtagagcggatcacgccgccttaccgtggctgcaggctgctaccgccggggaagcggcgaggacggcggcagggaggcaaggcgccgcgccggtggctcctctctctctcggcggcgcggctcctctgctccgcgagccgtagcggggcgcccaggaaggagcaggtccgggctctgcgctcagctccagcgagaccaacaatagctcccgcggggagcggagccccagcgagcctccagccgcgcgcgcacgaccggctcccgctcccggccgctcccggccggcgtccctgccagcactgctgccccacatgaaacagctgcaatcccgaggcttctggggggttggggcgggtgtgtgcgcgcgcgtgtgtgagtgtgtgtgtgtgtgtgtgtgtttaatagcttcccttctcttcttcccctccctgcctgctcgcctgcctgcctccgtcccccaccctcgctctcttacacacagaaagagagggcgagcgagagagagacacacacacacacgcacacgcacacgcaggttacatgaatgggaggcggtagccaatcctacgaggccggcgagccgcgcggcgcactggcgctgggagcagggccgcactccggcgcgggggggcgccacgcaggtgatgggcgcctctccgggggccacgcgcg

SEQ ID NO: 10799 - DNA, 384 bp, Homo sapiens
ccggaagtcggggggcgggctctcatagctactgcccgtcaccagctcgttattgtgctcatatagggtgacttgaccccgaggcggtggaggagggaacaaccccagagagcacatcttgccggttcgcaggacgtctgcagtcggcaaactcctggccggaacggcacagaccgcactcccgcaactcggttcccgggctagattcgtatgcggacgggtaccgcaagggacaaacggcgaggcggaactcaacggaagtgaagaaaagactaacgggaaagaaggacgagtacgcggtcccgggacagacctccaaagcttcttcctgcgccccctggcggccggagggggagcagcgcggacacgtcccccggccaaccg

SEQ ID NO: 10800 - DNA, 1432 bp, Homo sapiens
acgccctgcgcccccagtcggggcccctccacccggcgccggcgcgcagcatgccgggagttgcagtcctcgcgaggcaagttccgcctcgtccctgcttgggggaggaggttggagagccgccctgccggcctttgaattttgccgcgaaaagcgcgcgtggcggcccccggctccgcccctcgcaggacgcggtgccgcgtcaccctggtaaccgcctctcagccgccgctgattgggctgggccgcggggggcgggcgggggacgagacgcgggggctgctgccggcgctcgcgcctgtcagtcgggccagagcggagcagcgggcaggactgcctggccggctgctccgcggagaggctgcgcgcgccggccgggggaggcggacagccgggcccggcgcctgtggggcgcggcgcgcggcacccgggcctgagaccaggcgaggcgccggcgcgcgccagacggcgcgaggctgcggccccgggagcccccgcgcgccgcccggggccatgggcgcgtgagagcccagcgcgcgcggcccctgctgcggcttgcgagctcgcacacccggtgcacagtcccccgggccgtcctcgtgtccgtcctgcgccactgggatcggctgtttctcagcgccgaggcccccgaggctgcatccgagcttgcgtcgcccgctgccgccgccgccgccgctgccgccgccgctgttcgccggcttcccctccccccacacccggggctcagagcaggaggaggaggggccggtgcattctcgccgctgttctttgcaacctgcaggggccggtgtatgtccggcgaggagccggggccgctgcgggtgcgtgcaacccccgaaggagacaatccctccacctcggggcgaacccgggggctgcaagccgcgggcgggcgggcgagcgagaggaagcaacaaagacaggctgcagctggggctggcgaaaggggccgcggccgccgggctcccagcgcgggcggagagggcgccctgggagcggcgcgggccgagctgcagccttgagcggggccccgaggggaggcgcagcgccgcccgccggacgtggcgatcacgggccccggcgaagatgcgtcgcctgagcgcccgcgcggcccccgtccggggcgggcgtgacccctgctgaacggagacctcccctcccccccgacttcggacggcgcaggccggcgccaggatagccctcaccgacagcgccccttcccacccggagagaggcatcgacccccaaggagggcttcgtcaggcagcctctgccactcctgcatggctgcgacccgtcgagcggagcgtcgtggtagctgagacctggtgcccttcgacggcctggctgatccggtgagttgtgcggggcggggttctgcgctggagctgggggcaccccctggcgtccg

SEQ ID NO: 10801 - DNA, 325 bp, Homo sapiens
acgtcagcgaaggccgtctcggcgcatctcagacaatgagcgcagtgtgcaggagcgaggggttggcagaggccaggaagctcctggggccaggcgcggctccccacccccacgccagacaaagagcgcggggcctggggagctggcggccttcccgccacttggggcgcctggggggctctggggcgggggaggcgggggctttgtctaactccgccactgccaccaccggccaggccgcggcttggcaacccgtgaacaggaggcagggctgcagggcgtgagggatgatgacaaggaagccggaggagcagcggcggcagcg

SEQ ID NO: 10802 - DNA, 1242 bp, Homo sapiens
ccggccctggccccgcctcgcacgcgctggtgctacagctgtggtgcagacgcccttccgctgcgagggtgcggccgtctcggggcgagtgcttcccggcctgcaggaggcgaactcgggcttccccgggaggcgtccgtgggaacgcgcacctgcgagtccctgccggctgaggagccgaggtctgcgacctctgccgacctgagctcaggcgcagcagcgcagacctggccgccgtatcccctctggctgggatgcgggcccacgcgggaaaggctgaaaggtggggaacaccccggcggaaaggaaccctccctctctgctctgaaggaaagtttcccaacacagccatgttcttggtggtctccggtcccccatccccaagcccccagtcagcctcacactcatccgcttcagtagccgcggagtgggggcctccaaagaacccagctgcagagcaagtccggctgacgcagtgtgcgctgggggcggggctctggacgggggcggagccacggcgagagccgcggtgagggcggggcccgggtgggcggtgccctgagcggggctcctagtgggcggggctctggggtggcggccgttgccgggctacgggagagcgcggagccctgcgctgggaggtgcacggtgtgcacgctggactggacccccatgcaaccccgcgccctgcgccttaaccaggactgctccgcgcgcccctgagcctcgggctccggcccggacctgcagcctcccaggtggctgggaaggtaggtgcgtcgctgtccccggcgcgcggcgtcccgcgaggtcttcagccctcgccctggtggatccccgctgggtgggagccgggagtggaggcggccgccctagggagggaggagcgcaggcgggggctgctcacgggcggagtactgcgcggcgaagggaacccccgaaggggctgaccgggtctcggggccgtgacaggcggcgaggcggtgggaggggagcgtgtgaattcacgccgggtccccgcgggcgacgcgagcgacgcgacctggactcctatccgggatattgtaaatagatctgcttgtgaggctcacgactgggagcctgtcactctgcccaagcccgacccggccccggcgcccgcccgcgtcctgcggaggtcccctgagccagcgcgcggctgcaggggtctcggggccgcatcccggaccagcgccagcggcgggagagcgttgtctgtgagcg

SEQ ID NO: 10803 - DNA, 1460 bp, Homo sapiens
ccggggcagtcgagccacccccccaaagccgacctccgggagagatctttagctggacgcctcccgccttttaggagcgatggctgcaactattccgtccgtccccacggggcgccttcccaacccttcggttggctcttcccttcgcagggctcttcccggcccaccgcctccttcctgcggcttccccggctccccaggccggaccgaggccagcgtttgactttcctggctcccagtctgctcccctagtgcccaagagcgagaacaccgcttccgctcacatgtaaaggtcgggcgcagcaaatgaagtgggaaaagagaaaaacagacaaaccgctgtggcataaaagattccttttccgtccgttttgctttgcagttcgggcttagcaggagagggttggggagaactggataaacgctttggaatccacaaaggccggtggtgtcgggggccgcaaagggagtgaagaattgaagcagtgagctggataaatccggggcaaagcactaaacaatatggatattttggcaacgcgtgcgcgtgtgggtgggcggacaaaaggactcattactcgtatgattgcctcaattctccacttcctttgtgcacgtgtgtggacgctgttccaggcccgagtccgcctcccgcccaggacgcacagctccgggccgtggcccccgcgcgtccggttgtgcgtcccgggtccctggcccgcgcggcagctacagcttggcggggtctgcgcggaggaggtcggccaggcgcaggctgccgatcttcttcacctcgcccagagcagtgcgcagctcctgcgcggacgggcagagcagccggcgcgccagctcgcgcggcaccgccgtccggtcgctgaagcgcgcggcgagcacgaaggggaaaccgaagcgcgcgcggtactgcgcgttgagctcggccagccgcagccgctcgtccgcgcccaggctcctcaggcctgcgccgctctgttcccgctgcgactcggccgtgagcgtgccccgctgcagctcgctgcccgccaggtccgggtggcagcgcaggatgccctcctggcctgcggagaagcacagacaccggcgggagcgcgtcaaccgcgcccgtcccgcaccgcgcactcgagggggcgcgtaggccgcgcccggcccccctgccccgccccgccccgcccggccccaaagaaggctgcgggagggtgaagtagagtacccaggcggtgatgtcctggcggaacaggggcgcccttggcgcgcccctctaacaagtcctggaccttgcgcttctcggtccccactacattcggtcgggaccaggatccaggggcggggcgggaagtgacacgtttgtcttttgagaccttgggtcaagaagagcggaggagagagagggcggccgctgaggctcggaatttacgactaggtcgggagggagcagagacgcg

SEQ ID NO: 10804 - DNA, 1064 bp, Homo sapiens
ccgcgcgattgaggcgctagcggcggagctggacggcctgggaaggcttcggctcctcggctgcggctccagcccggacggcgccgcgcaactttgccatccttctggcccagccccggctacaggaggaccccgcgggcaacgcgcggagttcctggcacttcccggcggtgtctcttgttgtctgcccggggaccgacttcgcatgctctcaggctgacctgtccaagcccgaacaccgggaccatgcactcagccgggactcccgggttatcctcgcgccggacaggcaactccaccagctttcaaccaggaccgccaccgccgccccggctgctgctgctgctgctgcttctcctgtcactggtaagccgcgtcccggcacagcccgctgccttcggcagggcgttgctgtcccctggtctcgcgggggctgcaggggtccctgctgaggaggccatagtgctggcgaaccgcggactccgggtgcctttcggccgtgaagtctggctggatcccctgcatgacctggtgttgcaggtgcagcccggggaccgctgcgcggtttcggtactagacaacgacgcactggcccagcgaccgggccgcctgagtcccaagcgcttcccgtgcgactttggccctggcgaggtgcgctactctcacctgggcgcgcgcagcccgtctcgggaccgcgtccggctgcagctgcgctatgacgcgcccggaggggcagtagtgctaccactggtactggaggtggaggtggtcttcacccagctggaggttgtgactcggaacttgcctctggtcgtggaagagctgctggggaccagcaatgccctggacgcgcggagcctggagttcgccttccagcccgagacagaggagtgccgcgtgggcatcctgtccggcttgggcgcgctgcctcgctatggagaactcctccactacccgcaggtccctggaggagccagagagggaggcgccccggagactctcctgatggactgcaaagctttccaggaactaggcgtgcgctatcgccacacagccgccagtcg

SEQ ID NO: 10805 - DNA, 622 bp, Homo sapiens
ccgccagttagacggtgtttctgccgcccctgccgtcacccgctgggtcccgtcccgctccaagcgcactcccggcccgcagggtgggaatacgaggattacagtgccccacgggcgggcgggccaggatcgcaacctcggcggagtcggcgcctctgggcacctctggcttccgcgccccggccgcacggtgaccacccgggaggggatcccgggcgccccgcaacctcccggcccccgtgggccttcgggtcgccccgcttcccgccgccgcgtacccttcgcgcctcccggccctcggtgccggcccccgccccgcgtagctccgagtctttagcccggccggccccccacccgccgagcgtacccatggcggcggctcccagggctcctgcgacctgccggcgggacgtgctcctggcaggtgctactcctccgacctgacgtccaggcccggccccgttgccccaggtacagccccagctctgcgaggcggggccgccggctccacccggggggcggtgctgcggggagcagaggtccgtgctcccgagccgtcgcgcgtggacaccagccccggcccaggtgcgggtgggccccgacgggagcgcgtggcaggccg

SEQ ID NO: 10806 - DNA, 1622 bp, Homo sapiens
gcgtttccaaaaccgagtccatcgccttttccctctgcgcagcctctatcccttcctgtgtttcgcatctcaataaacgtccccgccaagtgacttcagcctgaaacatgcggcctcccggactcctctctgtgtcaccgacctcttgcgctcagttctccggagctgccggtttaacctcgcaagtcttcccggaacccgtgccctcctcctgggcagcgttaccaccacgagcgcctacctgagaggacgcctgttctcatccagcctccaccctgcagccgagcaatctccgtaaaacgaacacctggcttagtttctgctggaaaccgttgaatagtccccactgtcttctggaagggtctgggcagctcggcgtggcgtccacggccccaccaggcctctgcctcctgcaggtcccgctacttcgtcaccaaagcgcccgccgcgctcgcatctgctgtgaggctgtgctcgggccgctcccgccgagggaacggccctcccaaggctctgcgccccaattctcgctcgtttgccaagaggtagccgtgtcggggagctagagttctccggggactctctcctgcccctcgtggccctctgtggaaccctcgttttaggatctgcacgccgtttccagtcgcgcgcgcggcacggagaccgcccgctgtgccccgcgctgcgctctctccgcccctctcccgcgcaggcctccctgtgccagccggctgtcgacccaggttaggaagcccgaggtcggggcgttaccccaagggccctcccgcttcccctccgagggcagagaggcgtccgcgcccggacgcactgcgggaacacctggagcgccggcggagctcggctgtccccgcgggagggagcccgacgcgcatccttgggacccggacccggcgcccgcgcctcgggacggatttctgcctcggctgcaggcgcagcgcgcagacctgagcctgccccgcggaaccggggctcgagtcccggcccgagcgcggcgtcggggccagcggagaggggcggaagccgcaagggaccctcggcgcctcggcctggccgcgatgaagtccccgcccctcctcaggtgacggatcgccgctgccgtcccgggctgcccaccaccccggcgcgtgcccgggagcctccaccctccccgggttctgtggccggccacgcgccccaggcacgcgccgcgccgggccgcgccaccaagcccgctgtccccagctttcctcggcagatcccctggctacccccaccctgcggaggggccgttcaccagatgccagaaaatcagggtggggcacgcaggccaggggctccagcggctgggcaccgtgtccttcccgaacctggtgctggaagtgcgcccgcctccgcctctcccaggcacccaccggcactgcccagccctgtctggagggtctaggactgaacgtctgtccccggccttcatcctggctgcagaggactggccgggtgatgccgcgctgtcctggccctgggcccgcctggaagacccgcctgtgtcgcgggccccctccctggctctggcctctaaagcgcccccggcacagcttcccggcccttgcagcccggtggggccg

SEQ ID NO: 10807 - DNA, 324 bp, Homo sapiens
acgtgggttcggagcagggggcggcgtccgcgtctgacccggcctgccggttgcttgtcgcccgcgcaggagctggccgggcgccgcctgcaggctgtcccgggccgagtcggagcgacgctgccgcgcacctgggcagcccccgggggccgcgctgtgccacggccggggccgctgcgactgcggcgtctgcatctgccacgtgactgagccgggcatgttcttcgggcccctgtgtgagtgccatgagtgggtgtgcgagacctacgacgggagcacctgtgcaggtaagagggcggcgctgtctcctccctcgggaggtcg

SEQ ID NO: 10808 - DNA, 1881 bp, Homo sapiens
ccggggccttccagtcccgccggggcgcttgctcctcggctgagctcgtccgcagcgcggccctcggctactggcgaggctgtgcggaaccagaaggtcgaccgcgcccgggcattccccgcgcgcctctgaccccagctcggctccccggaagccgcctgggcgacttcgcggcctaatacccggctctgcgaaatcgctcgcgcctccggcccggcctggagggccccgcaccatccgcgcgcgcgcgcgctcgcacaggatccggccaacaggcgccgggacccttggagcccgccttgttagaaacttgctacgcgcgccgccgcacatgcgccctaggcccctccggacgcaggcgccaccgacctcgcttccgccccgcgccccccggctgccccgccgcgactccgggccgcgagcgctgccgcacaggcgccctaggcccctcggggcacaggcgccgtcgatcccgcttccgccccgcgatcccggcacgccccacgtcccccgcacctcagacccgctttccccgactcccactggacagccggggaaaatggcgccttaaagcgttcgcacccaccttgccgaaatgcgcggcccagtgcacgggcgtccagccatagaaggagtcctcagaggccaggtgggcgtggggtgtctgctgcagcagcgagcagagcgtggccaggtccccgtcgcggcaggcgcggtgcagcgggaaacggagcgagagcagctcctcgctggagaagcccgcctctacgcccgcgcccgctcccgccgccgacatggtccgtcaccggagagcgcggggctcgctggcctagaggacgcgtcggggaggactcgagaagccgccgccgcagcacaaaggaacgagactagcgccgcggtcgcgtcccacaggctgccgagcggagcgcgcacagagggggcggggcggggcctggagcggccgggctgggggcggggcctggcccagaggacgccttgtgcagccgggcaggggtcggggcctggagccgcggacctctggagccgccgggcagggggcggggcttgagccggaggccgcctggagcagccgggcggagggcggggcttggagctgcggacgcctggagcggccggtaggtggcggggtctagcctagaggatgcctggagcagccgggtagggagcggagcctggaccagaggacgccagcagcagccgattaggaggcggggcatggggctgtcgacgtctggagcagccgggcattgggcttgggctagaggacgcctggggcggtgggcgcctggagtagccaggcagagggcggggcctggcttgggtccacgcctggggcggccgggggcggggcctggctggaattgacgcgtggagctccggtggagggggcggggcctggctgggccgctgcctacagcggcttccggggcttggaggtcacggggctcggaggtcacggggctcggaggtcacggggctggctgtgtggggggctcaggggcgtagagtggccaagcagcggtctgagcgggtcccggggcctccggcgcggtgggtctcggctgcgccccgggtgcggaccatgatgtttccagcctgggagccggtccgggcggggaatcccggctgccgggggcgcgggttgaggctctgcgggcccgcgcccagagcgggtgggagtcacgggtctcccggaggcccagtagcgcgcggtgaagttgtccagtaaaaatttatggagcgcctacggggagcagggattctcgttaaaatctgggaatcagcaagccctagttccttacagagcaggacagattcctcggttttgtccgagggacgccttcttcggaaccgagtgcg

SEQ ID NO: 10809 - DNA, 944 bp, Homo sapiens
ccgcgtggggcccagggaggcgcgggctgcgggggattgcgcaaggccggggtttctggaggccgaggccgcggtgttttccgcgaggttattatgagctgagtgttcctggcaggcgcccagggactttccgcccccctccccccgcggccccggcgggcgccggccagaccgccccgccctcccgccagctcggaacgccctgtacttcccctcccggctgctcggcgcccgccagcggccagaaactcccgccccgccttatgcaaccggggacttcgcgtccccgctgccgccccgcccccggcctagaggacgggtctggggggagggggcgtgtggcgacgctgccatccaccagggcccagccgccgcccctccgagttgggccggtgccccgcgcggccctgcagccctgcagcgttcggggcggtgcaggagccccggggtgccgcggcgcccgcccggctgcatcgctggtcccccggctcgggctccaggcccggcgcctcccacccccaggccgcgcgcgtcccgccctcccgacgacccccagccccgggcctccgccacttacgagtccccgtcctcggtgagctgctgcttccagggctccgagccgcgcggcacctcctgcggctcgaggcggatctcctgcagctccttgaccatctgctcgtactcctcgtctttcatggagtccaggccgctgtcgtggcggtcgtccagtagccgctccttcttcagcccgtcgcgggggccctccatggcccactcctgggggcgctcggccgcctggaacatggcgcggacgagctgcgggcgctgctgcgggtgcgctgggccgcgggctgcgcgctgcttcctcgctggggcgctggcgggcgggacggcggcacggactgctgtgggctctgcagcgccgccgcggcgccctataaacg

SEQ ID NO: 10810 - DNA, 1514 bp, Homo sapiens
tcggcggcgccccctccatccagcgtgaaacccacgaggcgcggcgtctcgagtggcgggcgggcagggggctgcaggattcacgaagccacctccgccggggaccgccttctctcggagtggcctcccctccggcgttccgctttagtaagacgacactcaggccaaacagccgcccccggccagcccgactcggctctggagggagcgccccgagggagtccagccggaggcggagaaggccactcggccagaaggtggggagccgccggcgtcccctcgcacctccgtctccacagcagggggaaaggccctgatcgccgtggtccacaccaccgcgtccacctgaggctcgcctcgcttcctgggtccctagaggggtggcgtactccgctttctcctgcccccaagtggccgcacccctccgcgggacgcttggttgggtccagggcggggcgggcgggcgctccccgtactgccgcgagctcagcgcgcagctcccgcggctcggctgccgccgcggccagttggggcgggtcgggggcggggtctcagggggcggggattcgggggggcgggtcgggtcgggaggcgtgggtggggggcggggcggacgcggagcgcccctctggctggcggggccaaggggctgagaggagtggggcaggctcggcgccggtaggaagagtcagaggggtgaccagagagcccaacgcctggtgctcaagactttctccgaggtatgaacaagaaccaggcgtctgggccctttccgctcgccccatcgctcagccgccgcgccccggacgcccgctgtgccccctgccggcggggcggcggcgggactgggtttcgggagggtttctggaagtcgcgagtcccagcgaaggcagtgcaccgctctccgcctctttcttcgccttcttctcgctcccttagctctgggtgtcgggcaccggtggtaaggtcgcttctccgtgagtcggaggtcgctcactctgggacgggcggacgaggccctagggcagccgagcccggcagcgggggaggcgtggagctcggggcggcttcagcggcgggggcgggaggctggtcctggctgcagactgcgcgcctgggctccgtgcgcggtccctggttctctgcatcgcggaggtccccggatcacagggctccctggcgggccccggcacccaggtctgtgtcgctgtggctgggcgccgggactagcacccgagtcccgcgctcccgggggctgcgccgtgccgcctgttgtgcgcgcgcagaggccggacagcccggctgcgggaagggacccgagcgcagggtctgccccgcgtcccggaaagtgcctagtctgcggagccggaggttgagctggggcagatcggcgccagacgggggcctgggtgagatacgagttgggggtgcggcctgcagaatttgggtttctggaggagcttacggcgcgctggcggagccccaggcgaacaggagcaccggattcggctccg

SEQ ID NO: 10811 - DNA, 2144 bp, Homo sapiens
gcgtcgtttccccttcgcgctcttcgaatgtcaagtgcaccagcttccaatccctcctctgggcgggcccggtctggctaatctcagctgcagattccagtacaaactcaggactctcccccgcccagccgcccctacacaaggactcgccgaacacaccttgaatcccgcgccagagcgcagcccggaactgcagctcgcggcgcgggcccaggtcgggggtcgcgcgtctccagtcggtgactcaaggccgctcggtccgggggtgggtgtgggtcggcaggaccgaccagggccgcgcgggggcagctgccgggcgttcggtcacctagcggtgggagccgaggctggctttggccagtcgccattccgccgcgggcgtctgtctcgccgggttcccgggcgcgggaggaaggcccgcgccgcttcccactcggcgcgcttctctcccagtgcgcagtggcctggtgggtcagccggcggcggctggagcgcggggccggccctgcgcacgaatgaatgggcgcccgggggacgcgcgcgctcggggctgaagggcattaggaccgtgaggatcgctccgcgatcctgtctctccctatcacccccccgcccccccacctctctcctttttctgctctgcaggactgagcagctaggcgcgagcgaaaacaaacagctggggctgcgagcgcccccgccccggccccgagagcacgccggcccagtcccccacctggggcgcccgtctgcccaccatgaggaagatccgcgccaatgccatcgccatcctgaccgtagcctggatcctgggcactttctactacttatggcaggacaaccgagcccacgcagcatcctccggcggccggggcgcgcagagggcaggcaggaggtcggagcagctccgcgaggaccgcaccatcccgctcattgtgagtacgccccgagcgtcggccggccggctagggagccgcggcgcgcgtccagaccctgcgcggcggccgagggcgcggggcccggccagggctgagtgcccgctgcgccgggccggctttgtatatgttggagcattcctgcccgttgttatggcaacctctgccgggcggcggggctggggcgcaccgactaagggagggtgacagagggtgggggctgggagaaagtgctgcaagtttggtgggcccggcgtgcgcgcgcggctgggaacgtggcggctctcccggctctgcgctgccggggccgggagtctgggggctgcgggagcctcgtgtgccccggaaggctgccgggcccagcgcgcggcgagcgggcggtgggaaccactcgcagccgagcgcgtaggtggcagtgcgcagcccctctccagccttctgggggcagaggacatcgggtgggggcgtgggtaggggaaggctctctaggcgctgcgcctggcttcgaacccccttctgagccgggtcaacttgaacccgcttcttcggcgcggacacccagcttccccggagttctctgggttgaggagaggtctcgcactgtacgcgtctctcactcccaaccttagggtccgccaccacgggtaggtgggcagtgtcagcgcccgaacttggcgatacccttgcatgaagtcagcctcgcgacatctaagcgggcagggaaacaaaggcagtgtggcacagcgggggcggcggcggggctgcgggggcccttggcgctctggggacccgggcgggggcgtgcggagccgcagccgccctgcagggggcgatcctgtcgccgtctccgtccgagccccaggtgacagagctgtgcgtggccaggcaggggcacctgttgaggcgggaggctttggcacccgccgagagtgcgctcgagcgggcgcattcttccagacgggggcggttggtggacgagagcctcggacgaccctcgggaactaccagggcggggcagcctggccggatgaggaccaggaagaggagagccgagtggggcgggggtaaaggagtgaggaagcgtggcgattccgacaaggaaagatctgggcctgggggtggaggggtgaggagatccgcgggggaggtgcaaggtccggagggctgaggcttgtgtggagccgaatccgagaaacgcatccagacgcg

SEQ ID NO: 10812 - DNA, 379 bp, Homo sapiens
ccgcccggcggggcgccctcacgctgtgttctctgcggtgcaccgaggcgcacccggctgtcctgttgcgggtctcctggtcacctgtgggccatagggagagacgcgcccacacactctcgcccgcgcccaggacagctgcgggagccccgggccgctctaacccaatgcgtctcccgcaggctgagatgcggctgctcctgctcgtgccgctgctgctggctccagcgcccgggtcctcggtgagtgcggtcctgccccggcccccggaggaacctgcaggggagtcgggggcggggacgcgcgggcccgcaggcaacgtccccaggaaaggggcgatgtcagggaagctgggctgggaggaggcgagcccgcaccg

SEQ ID NO: 10813 - DNA, 637 bp, Homo sapiens
ccgcggcacgggagtgcgcacgcgcgtcggaggcgaaggaggaacccaccgcacctacagggcggtcgagtgagggagctgctggcgggtgggtctggcaactctttgggaggccgacgcgggcggaccggcgggtgctgggaaccgagcctcggcttgcggccggcagtttccgtgggtctgtgaagaggtcggcggcccctgcgggcgccagtcaggtaagcccagcccggtgctttccaggaagtccgtctgcgggcgcgggtagggagtcgcaccggccatggtggctgaggagggagaggttgctgcccgccggccgcccgactccaggctccttcccgacgggtccgtctcggggagcaggggtgcgcgggggctgcttctgcgcgaacggcccgggcgggggacgtggggcgcgctgggcgtcgcccgccggtctaggcgcgcgaacctggcgttcccagtgaatcacccgcggcccgggcgcccgggttcgggaccggccccctcccctcccgctgagccgcggccgagctggctccctgcaccctacccagcgtcgccgggacgcgatcacaccgagatggcaccgagcctccttcaaaggcttcggcttgttgaaagtggggcggcg

SEQ ID NO: 10814 - DNA, 959 bp, Homo sapiens
ccgcgggatcggggggatggtcgaccctcagatacgggagggattgagcgatgcccaaggagagcaggagaacactgcgcttggagacccctgagagccaggggcgggccgccccctaaagggaccccggagtcccgactctcagctccagctcttcctgtgacaccaccctccggacagagacccaagctccaggcccggccccgcccagaggttccagggagaagaccaggccaccgcccactgcccggcgtcggggaggaaagaggaggagcctctgtgtgcccacatctctggccgcccagggcagctcggctcggtctcgcaaccccagcccactggttcgggagacctcaaaggctccaccgccagcgcccccagcgctcactgtgtgcgccccaccccagccctgcctgcgcgccgctcccgccaccctcgcctcagtctctgggccggaagccccctctcctcccccgccgcagccccctcctagtccctctccctccgccgatgcgggaaaccttctccgccccgtcccgccctcttcctccagttgcatctccgcccggctcctccgtccagtctccaacccaggccccgcccctccccacccatttcccgccctgggccgggcccccggccccaccgccccctccccggccccgccccggcccccggaagcctcaccccgcccccggccccgcccccccgaagtttcttgggcccccggcagccggcgggacagaacgcggagagtcgccgcctggccgggcgtagacgcggtggcagagcccgcgcggcgctggaagcgagtggcggagcggcgggacctcggcggactcgccatggaggaggaggtgagggcggggcccggcggggcgttgggctggggtcctcgagcccctcacggggattgcggtcctgggctcaggccctcgttcctgcccgccccactcccg

SEQ ID NO: 10815 - DNA, 826 bp, Homo sapiens
ccggccgccagccctgggagcctcggttgggcgacgaagctgcgggctggggcaccggctgcctccacgggccggttctgactcaggggctcggcccggagctgcttccccggcggcggggctgactcaaccccctctgcccgaggagttgtcgcgcgcagtcagcgccccgaactcgcgcgcggcccggcgccccctcggggcccacctcccgggccagccgccgcgcctacctgtgcccgcggctcggctcctcctcgctcgcgctgccccagccggggctgaggtaccgggccgggtccccggcgccccgagtctccgccccctcctcctcgtcctccaactcgtccacgtcctcggcctcctggatggcgacgcggatctgcaccgccgtcttgggcccgggccgagcctccccgccggactgggccatggctcgcgggactgcggcgccgccggggtcctcacgccgcaaggcccagccagccggtcggcagcgactgcgacgagggggcgggggcggtgcgagcgcgcctgccgctcggcccaggggagggacaggggtcgcggcgccccgccccgcgccgccgccgccgccgccgccgccgccaccaccccgaccgctagtggagcgcccgcgcaggcggggcctcggaggtggagggcggctttccggagctcctccgacggaggcccgtcccggaaggatccccgcgacccccgatcactccctccgtcttttcgccgctgtggggccccagcccgagaggaggtgtcagggctccctcctcctgcgccttctttcacggcgccgcagggatgggcg

SEQ ID NO: 10816 - DNA, 2156 bp, Homo sapiens
ccggccgacttgaccctctcctgttcgcgctccacggctttctggctgccgaacatccttagggagaatttgttgaccccgggttggagcatggccccgaactggcgctgcatgaagccggcctggcccaggcgcacctcggcctccgggaggatctggtcgccggcagccgcgcctccctccactttgatagcggtgtccaccgagggctgctcgcaggaggcggaggccggctgcggtggctgctggggcggcggcggcgaggctgcgggctgcgccgaggcgccggggcgctcgggctcggccgccaggcctgggggcgtcctgtcctcgccgggggacgcgtcgccctcggcgatgagccgccgctcctccgcggagtcatgcaggtgtccgtgactgctgccgctccccgtgccgccgctgccgccgccccggctgcccagcgaggccaggctcccgcggaagcgcctgcagtcgccgttcgtgctggacttgcccgcgccgcgggccggcccttcgctgtccgctgccccgagggccgagctccgggactccgtgccacccgcggccgccgagggggagggcgagggcagtggccgcagccggatgctcctgcggctggggtcttggcggcccccggccccctcctcctcggcgtcctcttcctcgtccatgatccacgccttggcccccacctgctgcgggaggctgtagagccgcttgcgcatggacggcggcagcttgtccatggcgccaggggccggggtcggaccgggccgggggcaggagcgcggcgccgcggacgggctccaggtccgcccgccggtcagtccgcccgtggggacgcgtcctttgccgccggcgtgggggcagcctcaggcgcccatgcttgggcaggctgcgcgccgcggggaggatcctagtcccgctccgagtccccgggctcgccgcgctacacctcctcccgggcccggctgggcgcggggaccccgcgctcccttcttgcctccctccctccctctggcgttcaggggcgcggcgcgccgcccggctccaggcgccccgcccccgcggggaacaatgggcgccggccggagaggctctgcggccgcggcgctcagggaaccgctccggagtgcagagcgcacggcccgcgcgggtcccgggcgtgcgtcccgcgggagggctggctgtccgtctgtctcgccgcccgggctttgtggctggccacccgcgagctcgcctcgcctcctctgccccggcccgtccggcccgtcccggggctcccgccgcaaccgagcggagcccagcgacccgccgggcttacatcagcggccgcctcccccgaagcgccctccggcagcgctcgggctcccgcgccccggaatattcatgaagccgccgcagctcgcgggttgccataggagcggctccagcagccgggcctgcctacctgggcttcttaaaggggcagcggcgcacgggccgggggctggaaaggggcggggggcgggcctggcaaggggcccaggttagaccctcgctagaccttcggggccggggtgagaggtatccacactgctgcgcccttaaatctctttcctgggctaagctgggagtgcgccccaagtctgaagctccggcttcagttgcgaattccccatcctaagattgaagggtggggggtggcttcccaatttctccatcaccaagctctgggctcgcctttccctggcatttttgcccctcagctgggtctccgactttcctcttgggaggcgaccgggttcgtctggatgcagagtcccggccttcccgcaaccctcctggagagggggcttccggaaatgcgccgcgtcggggaggctcccacggttttcctgtgacatgggcagggtgcgaaccccgcgccagtctttcccctgcaaagcctcgcagcagccaggcaaggagggcgtggggaaacagggagacacgcacagggcgcgcgggtgggacccagcccttcgaggtaagacttcgaggaaatgcgccggcaacagtgacggatgcgagatccgaacgccgacctccgcacgcgcctctccctcggtagttccgagaaagggacaagccggctgcagcggggagcggttgggccggttcctcggacg

SEQ ID NO: 10817 - DNA, 1441 bp, Homo sapiens
ccggagggaggaaccaccgtaagcggagactccgggcggcggccggcggaagggctgggcgggaggcgtcgggatgccggcaggaccctgcgcccgagggggtagggggctcgtgtcggggttccaggcgcagattgatggggcctaagcagggaatgtgagggcggggagggcgtacaacggaagggactaatctcgcggtttcgagttgggagcaaacctcgccccccaccccccccatccgtttccctttctcagtgaagacggtttgggggcgggtggggaggcgcgtcctcggagcgccctcgcgctcccttttcgctccccgcgcgcgatccatcgcctctcttcccccgaggccagcgatggctcgggtgcgggcgaggagctgggagggcggctctcgacgcaggtgtcagatccgctcggcagtgctcggcgcgctggcccggcccccagctcctccggccgccgccccccgcccgccgcgccgcggcgccaggagggcggggccggggcgcgcgccgctcctcagcaagcgggcgggcggcgttcggtctgagggagcggggcggtctccgccggcgtcgcgcgcgctgtgtgtgagcggggtcgcgcgcgcgcgcggcaggcgagtgagggaacgaggagcggccgggtgtgagtgtgtgggagtgagagtgtgtgggagtggggtgagggagaagctgacgggacgcgaggctgtgagaaactgggcgagtgtgcgaggacgcccggccagcctgcgggagccgcagtcggcggaggagaaaggaggcggctcccggtatcccgaccccctccccctcctctccttcccccacttccagccgcccggcggcccgcgcttcctcgaaggccccagcccggctcagtcggccgagagcgagggaggagccccccgacccaggtgagcggtacgaccgctgttgccctcgggtgtagagcagtgaggcgaaggcgcgccctcccgagtgggcgagttcagcggaatggatcccccgattagcgggggctgggccggggaggggaccggcccgagcgcgcccggggtccggggctagttgaggccggtggtcgccgctccgcggagtcggtggggagcgaggcggggcccggccttcgcgcgtgtgccgggaggcgccggcccgtggcgtgtgcgtgcgaccgggcgagccgtgtcgagggggcggcgacttcgggcgtgtaaggagtatggtttccccgccggcgagggggtgtggtaaccccgggaacgccggctggagtcggacccgcgggctgctgacctgtcctcgggattgcggcgacactccccctccccccccttcccacaaattctatggagcgaccgcgggaggaggatcacgtggtgcggtcccgcagctactgtattcgattccacgttttcctccttacg

SEQ ID NO: 10818 - DNA, 734 bp, Homo sapiens
ccgaccctgggcacacagcggtaaactctgcctcgcaataccgtgtgggccttcgcgcacccctccgcgtgagcgttccgagcccggtgcagtcccggcttccgcgcgcccctgctctccgcacagcgctcccgctccgaaggtgctctgacaaccccgcaggcgctattcggagccggggcagggcagctggggctggaggcggcgggcgcgggacggagctccatgaaagttggaagaagtgattacaaatcgggacccgactctcgcagccttggcgctcgcccctccacgcaggcccgggatgccggcctcagcccccagatgtcgggaagacggcgccggccagtccaaggaagagcttccaggaggctggggagcaagggtgccgggctcctcatgccgggtcaggtctcccaggagtgccggctcccagggccactaggcccaggcctgcgcgaggagggagcgcgcgcctccctccacccacccggtcctcgcccctaacccgctctccggcccacactcacctgcctggctgcaagcgccgtcccgggccaggcagtcaggtttccatccccagtgcggcgcgctccgatgccgtcatcgggacccccgccccccaaaccagcccccccctcacccgcaactccgcccgccggggcgctcgggggcggaggcgcgagccggtcggcgtcgcggagtcggcccgcagacagggcgggcggggcccg

SEQ ID NO: 10819 - DNA, 935 bp, Homo sapiens
gcgtgcgacccgcgcccactgtggtcccgccctactgatgaccgtgaacctgtagggtgttgggccagcccctcaccccaaggctgggcaggcccccggagtccccctcggcccagacagaagctccctcaggagcgggggaggggaagggggcgcgcggtccggccccaggtgtggccgcggataatgagaccctggggatgggggcgcacctgcgccacggcgccccgcagagggtttcccaggagaccccctcgggctcccgccgcgccgtgggggtggggcagccctgctggccagagccgggcacgggccgggcgggcggcggggatcgtgaccgcggctgcgtgcgtccgcgtccgggcgcttctgtgcggggtcctggcacgccggcgggggcgacccgggtgccggcccgtgcgggcgacacgcgcgtctctgcggggctgcgcggggtccggagcggctgggggctctctgccgggcgcggctgggcgcggggggcgctcccggccgggatgagctcaccgcagtcgcgccggggctgagcgccgagcggggcggcggcggggcgggcggcggctcctcggcggctccgcggcgcccgggccgcgcgccgccatgctgggcctggacgcgtgcgagctgggggcgcagctgctggagctgctccggctggcgctgtgcgcccgaggtgagcgggccgggcaggggcggggggctcggctggtctcagccccgggcggggagtagcccctcccccgcggcaactttgggggcgcgcatggggacctcgcggcgccgaccccccggctggggtctggcaggggtgggggacttcatccaggctccagccctgtggggaagggaccaggtgcggacgggtcggcttgggaagcggcggcgctgggaccctctccccctggacaccgccg

SEQ ID NO: 10820 - DNA, 1054 bp, Homo sapiens
gcgcggcctccggaggccgacatcacaacgtttgcaagggccggctggggtcggcacatgattcgacctcacggccgcccttaggggtggaggggtcgctacctcaggtttggggaaggaacacgaggctctgaggagcgaatttgccccaggtgtccggggaggcctggcgcggggctgcctcggttccctcccagagccggggagaggggatatcgcaggatgccggcgcccgaggcggcagcaccaggcccacgggcgccccagtctaaatatcctccgtgcccctagagcggggaccctcgctccccagacccggaagcgccgccttccccgccagggacgcctgggcctccgcagaccccgccggccggcgcgccacccgcgccagcaccatggacagcggccgccccagccgcgcgctcagggccaggcccgggctggcttccaccgcggacggctgcggggtcggggcagccccgcaatcccaaatcccggcagcccccgctcagcagggaggggccccgggggcgaagagtgggggagaagccgggaaggatccggaggaggcggcgggggcggcgccaggggaggaataatcccggcgcagtgccgatttaggttgaaaacgctcccagtcatgggcctgcacgtggagcgccggggctgggggaggcattcgcggggctcctttcccgccccgctcgggagctcacgtttgccggcgcccacagtcccgtccccacctccaggcctcagggtcgagatggagaaaccaagccgcactttgagagcccacaggagggaggggacaggctgaggagcggccgtctgggtatgggtccggggcctggcttccctcatccacacccgcagcgctgccagaaggcgctgctctgcctgtggtcagccctcgacccgtgtgcttggtgggagctgcatccccgcacaggcagccccactgctccccaatctcgcgtccacgttcctgccggcccccgctgctcctcacactcccggcttgactgactcagcccgaatatcccccaccccg

SEQ ID NO: 10821 - DNA, 1474 bp, Homo sapiens
ccggacgctgtggcagaggaggcccgcgcgccgcacatctgctgggacccttagctcgcccaggattggtagggagatcctggaagaccagcgcccggaggggtgaggccccgtcttgggggcaaggccgcgaaaccacggcctgcagcttcacgccaggggtacaaagaaaagcgtcgccgggaacccaacacctgcagacgacgcgcagccgcagaggaggcggggcgtccgaggccccgccccgtatgctaatgaagcacacaccacaccgccccgccccggcgcgagaccggtccaacgctgcggagatccagaggccggcggcgcccggaaacacccgcggaggccgaggcagggcggggccgggcgccggggccgggtcgctgggcgggcggcacagcccgggggaggtcaacgggccggccgggcgtcccggggacgcgtctcccccacggtgcgaagtggtacggctcgcaggggcggggcccaggtcatgtgacgcggccgcggccgccattttgttctgcggtgctggtatttagagcgcagcggctgacgggccggatcgccttcgccgccgcccgcccgcaaaccttcgtgcccggcccgtcctcgcccccgcctccgccaccgcctcggcccgcagagcttgccccctccccacccgcagacatgtccgagtccaagagcggccccgagtatgcttcgtttttcgccgtcatgggcgcctcggccgccatggtcttcagcggtgagcgcggcggcgggagggactcgggggcgggggcgcgcgcgttgctcatgcccgcagctcgccggggtccggtgtgtgacgtcactctgacgtaatcccgagctgtcgggggcgcccgggcctcgtgtgacagcgggcgggggtcggcgccccgagggctgcggggagccgccgggggtccggggcgcagggcgtgcgggcctggccggggtgtgagtctcgggggtccgggccggcggccctgccagccgggtcgtgcggttgcgggggtggggcggcggcgccgctgccatattagccccgggagcggcgagagggaggctggggtgggggcgcgaggggggcggcgcgaggggggccgattctgcgggcaggtgacatcacacctcgaaggccccagtgcgcgggcggcggcgcgggtccggcccaggaacgcccagccggtcgctggagctttccggctggtggggagcccatgtcccccacgggaggtcctcagccctcgcccttatggcggccggccccgagggtcaggtgggtctcacccacaggcaggtacttccggttggagctggttacagttgcccaatacccgtgtcgctgtgtgggctgtttgggaaagctgggctgagggcttggttcggagagcccgcggagacccgggtgggagtgtgtggaagtggagggagcggggagacagcagcatcggcgctggcg

SEQ ID NO: 10822 - DNA, 357 bp, Homo sapiens
ccggagaacttcgcacacacacgcactcgcaaacacgcgggctccctgcgccaccaggaagcagccgccagaatcgccgggtgttccccaactactcctgggagacctggccccccgcccccgcccgcgcgcgcggccacggcgcctccctccctcccgggtccccaaggccggaccaccggcctcgttgtcatggcgacgccggctcatctccccccacccccgcgcgtcttcacgcccctcccccgcagggagctggggcctccctcctcccttccccacgtccgtagggacccacaggttgacaggagcagggggtcgcctgctgtcaccggccggggatctcggggtctcccg

SEQ ID NO: 10823 - DNA, 814 bp, Homo sapiens
ccgccgggagccccggggctcggcttcagccccgggctgaacaagcagggaggggagaggcacttaggcctcgcctccccgcggccttcctcccctagccggggaggaggagacccaggaagccgcgcccggctccggtgggtggagggcctaggccgcgcctcccagccccgcggccctaggcctcggcccgcccgaggcggagcccgggaggtcggggcggggtcccgggccggtcacccacctgggttgccagtcattccagctccgcgaatagttggtgccgccgctgctcagccgagaccccggggctctgcggctcattaccttccccgacacgacatggccaagcgccgccgcccgaaccggccgccgccgacaccccgctccggcccggggctgaggaggaagccgagaaggaggaggaggaggcggcggcggagggcgggggaagaggacggccgttccgggttccgcctgagcccgcagggcaggacgagggagcggcgcggtgagagaggcggatgaaggcgaggcgacgtctcttccagggccgtgcgcggcccacgacgctggggccccggaggacgaggaggacgaggagcaggcggtggcggcagctcctcacgctcacacggccactgcttccccgcctcccggctccgcccgccgcgccgccgctgtcgtacggcaagctgggagcgagaggcggggtcggccccgccgggcctggggagagaggcgggtcctgtcggcggggcggggccgatagcaggcagccccgccccccacggccccaggctcttggacggcg

SEQ ID NO: 10824 - DNA, 847 bp, Homo sapiens
acgcaaagcgcctttttctccactttcggagatggtacgtgcgcgcttccacgcagtggcggctgctgcggcgagcacgtcccctgcgggacccacgcggggagtgggctggcagtgcgcgcacagcggcggcgagtgggtcgtgcacgcggatgcggggtgggagtgggggcgcacgcgcgggcgtgggcgagcgggccccggcagtgcacacacacggcaggggcgggcgacagatgcagtgcgtgcgccggagcccaagcgcacaaacggaaagagcgggcgcggtgcgcaggggcgggcgcccagcgggcttggcatgcgcgcccccgcccgaggctataaaagcatcgccacctgctgccactagccaagccgcgcgtccagttgcttggagaagcccgttcaccgcctccagctgctgctctcctcgacatggaccctgagacctgcccctgcccttctggtgagcccccgcccccgctcgcatcctgcgcactgcgcgcccttgtacctgcaaagaaacccacgccctgcgccttcgctcaaggacacttgggggaagggcccctgattccctattcttcacctcgtgaagggcgggcatgcctgtgtcgcggagaacagggagacttggcaccccatctcctcgtgacaggcgtggggacccgagttcgtccacattaacccttcctgtggcgtcgccctctctaggtggctcctgcacctgcgcggactcctgcaagtgcgagggatgcaaatgcacctcctgcaagaagagtgagtgcggggacccttcccctctgccgccgccccctctgctctgcggagtcggtgtctcaccacg

SEQ ID NO: 10825 - DNA, 589 bp, Homo sapiens
acgggggcaggcgtggcgtctctgggactgccggaaaacgacgtgagggaaaaactcagaggctacgaaaaggcgaacagacggagggcctgcctcaggggagctaagcagctcgcctgaagccccccatctggaaatgacgtgtttaactcggcgcccctgcagctccggccgcccttttttgtttaactccgcgcccctccagctccggccgcccttttcgtcgctctcccctcgcggtcgctcacccctgagatccctggttccactgagacgctcagcttcattcggcaactcgcggacaccaagcgccacaaattcaaatacgagatctagagacgctgggtctcaaacgtctcccagagtgaaagacagaggaaccaatcgaggctcggctgacctcagacgtctaaggcgataggcgttgctaagaaaagggggtgggacgatacccagttgccaagacgacggcttccgggtgggcggcttgaggtggcttccggccgccaggcgagactccgcgggaaaactccctgctagagagactaggagatttggggctgcggccgtttcctccggagcacccacg

SEQ ID NO: 10826 - DNA, 848 bp, Homo sapiens
cgcggcgcactcccccccccgcaccacacacacacatacacacgatgacacacattcctgtgttcccctcgatgtaagtggcctcgcctctcgctgggccccaggtgcccctgcaggaaatgcggaggcgcggggagtccagggaacgggcttggggtctcaagttcgtgatccccaccctcaccccgggctccagccctgcggcgccggcccgcagcggactcaccggacgatgccgaacatgacaagcacgttgcccagcagccccacggcgcacacggccgagtagagcgcggtgatggcgattgccagggcgagggacgaggcgctccgcgcgcctggcggccccgacgcattggcgccagcgctggggcaggcgctagggtaggcgtccgaggcgttggcgaagagcgggggctgcagctcggcgccggcggagggggccggttccatggctgccggccggctccgccgcgtccctctccaccgtgcgccctgggcgcggggatccgacgcgaggggagcggcaaggcagaggccgcggccccgacgccgccggctgccgcgccccggccgccccgctgtctctgcgcctcgtccgcctgcctcgccgcccgcaccggcccagcccccggcgtccgcccgctctcctcgcccggagcgctgtgagccaggagcagccgcaggctcctcggacgcgcccgccgcgcgcaccacgtggcccggaggcggccgccagtctgcgcccgcgaccgggggcggacgctgcaccaccggctcggagctgggcaggggaggcctcccgccccctccctagggatgctccgccggctcgagtgcgaccccgt

SEQ ID NO: 10827 - DNA, 1230 bp, Homo sapiens
cgcggcccgcatccttcctgccccgcgggcgccctgcgacccctcccactgcgtccggttccgacagaagtccagggagcagtggccctcgcgccccgtacgtcagacgtggggccaggcggcaggcccccagcccaggaatcggggagtcccctcggaagggtgtgctatccggagtcagcggctccccacgcacttcctcagagtgagaacgcacgcggcgcagccaccggcccgcttctcccaccgggggctctcggaccttcaacttgcctggggctgtctctgtccctcgggcgaggggctcctggggacccaggacacctggccacggggaggcggggcatggggggcagaaagccagatggagcgggtaggagaaggggggtgctgggaggagtcaaggagggagagagggggcgtgcatggggcgcggagttaagagccaccgagcctgggcgcggtgtgcaggcgagggccacggccttcgcagcagcggggaacgcggggagtcgaggcacccagcgggccggggaagaaggtgggggactccgcggacgccgaggagagggcactgcggagtcagcaggccctgtagggagtcggagaggggctgagcagatcctgaaggcgggcgggggacgcacctttcggcggggcagggtgcccccggacacggcgagcgcgcggtacagctcggcagggtgatagtcctccagcgccgcgtacagctcgtccgctgggggcccaggggtggcggctgcggcagggggtcccggggtcgggaccggagcggcgggcgcgacttccgagtcgggagtccgggcggcggggtccggggtggccgccgcctcctccttctgctgcagcttcctgagtcggcggagggtcatggctccggcgccggacgcccctcagagacggcgctggctcccctcggcggggctggcggcggctgggggatgccagccgggcgggccgcgggtcgcctccctttataggctccgagagcggggcggggttgggggcgggcggggagctgcctcgggtggcctcgcccccagcacggaggaccctccccgcgaggcgccgccgccctggagccccgcccacggcgctcgacggccggggaaactgcgggagctgggcgctcagtgggggaaaacgagccgcggacgcgaaggggcgggatgaggcccccggggcggggctcggggctcggggctgcgt

SEQ ID NO: 10828 - DNA, 1094 bp, Homo sapiens
cgcgggagtcccccgagccccattggccttcccttccggccgccgccacgcggggcgccgcgtccccacgggtctagacgtccagccaacttcccggctctgcaaaagcctctgggggtgcgcggggctgggcgggggtgcggcgtggtctcccccagggtgggctccaaagctcccacccccgtccggggcgctgacaccgccgactcgcaagcctatgccgcgctcggagcgccgcggggccagcacgcccgggcgggcggcccggaggaggcggcggcacggctggggcacccccggctccgatccgcgatgaatggggcggcccgggccccgctccccgcagccccgcccggaggtcccgctccccgagcccctcgctccgcggccctcgccagtacgttgcccgggcgcttcccaaactgcccacggagccggaccccgcgctgccaacgctccgctccgggcaaggctgcggcccccgccgggccccggcgctcgctgccccgcacgtccgggcccgggaggaggaggtcgggggagccgggccgggcgccgcgagcgctgggagggtccggccccgccggggagcggcccccgagggcgcaggagcgggagccgggccggagacccccgcgcagcccggtgacacccccgccccgcgttccagcccggggtccccaggcaccgcgcgcgcccaggcggcgcatccgcactcacctccgctccgaggcccgctccgcccgccacgccggccgccgccaacgagctcccggcccgcgccgccccagcgctctgcagcggaggcgccgtcctcatcccgaccgcaggcccgcccgggccgcccgcccgccgggcaccgagccgctctgccgcgcgctgcgcctcggggcggggtgggaggagagggagcagccgccaccctgcccaggtcgccgcgggccagccctgcagccagctccagccctgggccgggtgctgggaaggccggacgccggccggcggccgcggggtctgccccccggaggctggggcggcttaggttacagactccgccgcccccgcaccctccccccagctatttttagcgccgc

SEQ ID NO: 10829 - DNA, 1979 bp, Homo sapiens
cgtctacctttttcgcgtgttggagaactaactagcaaggcagggaatgcggttcgtgggcgcttggcctcctcaagcggctcaggctctcagagcgcgaggcccaggggctctggagccgcggccgcgacgcgcccgagggccgttctcttcgacggcagagcaagagtcaccgcgcgggagccccgagcgaccgccccgctgccccggtaccctcccctcgcagccgcccagagctcttcatgccccgtgacgcccgttagggcagcgcggccggaggccgggccggacgtggcccgagatgtccgggggcaggcagaagaccacgggcacgcgacaggcaaccgccgcctcggctctagaggtggacgttttgtctccctgcgcttcaataccagattttgtttccagacgacatccctgttgcttccggcacttggaaagaccaatcgtcaggcccgagaatgcaagacccaccctcctttgcgacggaggcagccaatccagttgctcgctacttccagtgtcgcatgcgcccttacgcaggaccctgcccaatcgttaccgggacgtcctcctagtcccgcctccggaccgccagagaggctgtcaatcccgcctctctccttcactccattagcgcactaactcacggcgctgtgacgtgcacagcccctgcggccggccggggcgggccaatggcggtggcggatacggcgggccaatgggcgggagcgtctcatgcggccggctcccgccgcagccgccgctgggtcctggagccagaggccgccctgagacggtgcgcgatggaccgagggccccagccggggaggcgccgccgccgagcccgcggccagacgccccatcagtagcgtccgcaccgggagccgcggctctcgcccgagccgtgggcgcgcccgaggggcgggctcgcctcccgccgtccctcgcagctctgccgggcccgagcccgcgccgccgccgccgccgccttgccgctcgggccgcgcggcccgggaaacgcggccgcgggctgcatgggcagcgcccgcgccccgccgctgagccgtcgcggagccgcgcagccctcggagcacggtgagaggcgccgctggtctgggggcggtggtcggggcgggcacggggcattcgcgcggccttgcggcctgcaggccttccccggcgacggagctgcgccgcgggcctccgggcgggcctggggggtcggggccgggtgggcgggggtctttgggggcccggggcgatcgtgagggaccaataatgggtcccggagcgggcctacgggtccgggttcggggcagccgggggtctttgggggcccggggtggccgtgaggggcccatagggggctccggggggggcctgggaggtcggcggagcttgggtcggccgtaaggggcggacgggggctccgggcgggcctgggtggccgggggcccgcggcggctctgaggggccgattgggggctccggggcgggcctgggggccgtgggggcccggggcggccgtgagaggcggacagggggctccggggcgggcctcgggggctcggagcggccgtgaggggcggacggggggcttcggggcgggcctgcaggtcttggggacctgaggctgccgggaggggctgccagggggcgctggccgggcgccgggttctgcggagctggggcgccgacctctgacccgcgagaggggcgccttcgccgtgctggtcgtagttgttattctcagcgtccctattattatcgctgttttgaaatgagagcaggcggctctcgggctccgagccggagggggagggcgaactggggacctgggggcgtcggggttgcaggaggcgcgcgtaggccgaggaggggcaggaatgcgggcagccgtgtggggggtgttagggggagggtaggcgggcgggtgtggggggtggctgggaggaaagcggtggcggtggcgg

SEQ ID NO: 10830 - DNA, 1930 bp, Homo sapiens
cgcggggagaccggggcgcgcggcacgcggcgctctcacctgtggatgttcatctcccgtggagggcggtgggccttgtcgtaggagaccttggcgaagacgccggccacgatgacgaaggcgatcaccccgcaggtgatgtagacggtgaagttggtcttgtccttctccgggtcgtacttgttctcgggccccggcgacaccaccttggtgctgggcgtctgtacccacaccgggctctggtagttggtgcactggcgctggtccagcttctcgtggcgcttcttgcagcagaagcggtagtagcaggtaccgcagcagtacaggtagccgctctcgctgttgttacactcgaactccttgtcgtactggccgctcacgtcgtagtagccccagcacgtctcgtaggtgacggccgcgctggccgccgccgccacagccgccgcgggctgcccccgccggcttcccgcctccgggattccgggcgcccgggcggtgccgttcagctcgcggccgccccgtgccagggcgcccccggccctccggcccccgacggcagcgccgcctgcactcagggtccggttggcggcgcggccgcgggctccgtggacgctgggcagcaggtccagggactccagcgagagcagcagcagcagcaggaggcgccgcagcgccatggcggggccgggcgggagggcgcggggaggcttccgcggcaggccgctcccccggcgggccgggctcggaggacccgccgcgcgggccgggctggaggcgctgagcggtcagcggctccggggcgatggcgccatcgaggcgcgggcggcagtggcggcggcggcgcgcggtgcgcacggaccggcccggcgcgggctgctcgggctctcaggctgcgcgccggctccgcgctccccctgcgggctcggcgcgcctcctgggcagccccatcccccgccggcggtgactgcggccccgcgcgcggctcggctcaggcaggacccgaagcgcggctccgggcggcggcggcggcggcggcggcgtggtcccgtccgggcgggtcctgcgggacaagacggggagccggtcacggggtggggcgactggcgctccgggagcaggaggagaaccgcgggcaggcgggcggggagggtgcgcgcagccctcgaggagagagactcggagccgggaggggcgtagagcccgctcccaagacggggtcccgcggccctgcgcgcctggaaccgagagcgcacgggccgcccctccaggcgcagctcggccgcccgggtcccccagccgcccggccccgcagcgcgctcccgccgcaggctggctccctgggacggagccggttgaggctggggtccggcggcgagccgggagagcgcgcggcggctggacctcactcactcaccatgcccggctgcgactgcagaggcggcggcggcggcggcggcggcggcggcggggcgaggcgggaacgcagctgccggagcgagcgagcggagagccgccggctcgccgcctgcactagtgccggaacgtgtgcgagagtgagcgagggagacacacgcactcacacacccgcacacacgggagcgccgcgaggggaggggggacaggggaggggagggcagccgctctccgccacccacgtttgcacgcccgggcgctcagggtgcggggcgggggggactccttttcgcttcttccggatcgcagcagttgaagctccgcgtcacgaaagctccggacagcagttattcgacacggcgaacccggcgggcgaagagggggccgggagcagggcggaacgtccgctctgcagccggcccgcggcagggactgacctcccctgccattgccttctctagccttcgcgaccagtccccaccctaccggagcccggggcagcgcgctgcctgagcgg

SEQ ID NO: 10831 - DNA, 3177 bp, Homo sapiens
cgcaggtggggtaagcccgggttaccgacgagacctgctcgcgtctccgctcccactctggtgccccctcccctccctggcagccccccccccatccgcctaccctccgggctcacttcgactcacctggcggtgggtcttcttcccccccgacccccggcggtgcggcccgtcccccttctgaccccgcgcctggccgtcgtgccccgaaggatatgggttacagaccgtgcggagacaccagctccgcgggcggctgtcctggctcaagtagaagaaaaccaccggggccagcgccgggtacggcagcccctccgcctcggagtccgcgctgcccgggtccttttctgctgaccccggccccggccggcccccggcccccgacaggtcgttgagccgcatgaagctccggggctgtcccgactcctcggcgcccgctccatcctcctcctcgtccatcctctggccagccggggccccgggcgatccggagaggggcaagcggcgcccctcagaggaggtgtcctcacgcaacccgggggccccggcgggggcacatctggtgggctctagggcgcaagctgagcccccgggagggccagttcagcccagctccccctgcccgcaggggcatgctgcccgcggggcgccggggcgcagggaaaccccgcccggcgcgagtcccgcttcccctgcgcccctggggcttcccgggccagccggccggctccccctcactttgttccggcttcttcgcttcgcgcccaggctccggttgccggattcggcgctaccttcggcgaagccgccccgagagggcgaacgaaaaggggggcagcggcggagggcgggggtccggggaggggcgccccctcttcccgcggcgcagctggagccggatctaaggggtcagcatcgtcccggctccgcgccaggcggcgggggaggggaggagggatctctttaggggtgggcttggagggggtgggggcggctccttcccccgccccgccgcgggctcactgtccgggaggggcggggagacagtggggggcagtcccgggcgggagtggaggcggagatgccgccgccgcagccgccgcggtggctgccgctgccgtagctgtcgccggcgccacagcctcctcctccggccgagacgcggagcgagcgagcgaaagcggcggcgaggagccccgcgcacaccacagctggatccctcacttcaacttcaagcctcggccccgcccccagacagccccgcagccaatcgccggacgccgccggccccgagccgcgcgcccattggccgtccgccgtggcagtgcgggcgggagcgcagggagagaaccacagctggaatccgattcccaccccaaaacccaggaccgcccctctcccctccccttgcccctgggtccgctcccgaaggctggagccaatcagactgctgcccagaccgaacccactttcctattggccattggggtctttgggactcccttggagggagcccgaagaatcagagtattcggcgcggggtcctggcgtagggccgcaggccccaggcatcctttgtccacgacccctgatttgggcagcagccggaggacggagctcagctctgggcgggcctggggaagaaaggagacaggcggcacgggggtgagggttgtcaccagggggtcccagagcgaaatcccaggtctccacctggttaatctcccaccctggagttgagcttggctgcgggactgggggagggaaggagcggagctggatgtcctgggggtggggcttcaggctggaggggcccagtcttggagaaacgggcggagctcgagaaaggctagggtaggcatggtctgggcgtggcctccacaaatctcttgggcttattggtcatactcccgagtcaattctgagacttcgaccctgacctcgtaaccctaacccgctggacctgacctcacattgacgctcctgggcttcatccctttgcccctagggaccttttgaagggcgtggactccacgcaggggcttcgtgcttgaacacgtggccccaggcaggtcgcgctggaccgcagagcccggatccccaggaggggctgcggagcagagcgaggacccctaagaaggaacctgtgggggtctcgagtgtgtgggagggggcggaagcacagagctgggctttatcgactcgaccttcaaagtccccaccaccgccaccccccaacttcgtgcctcagtttctcttaagtccctatgtggcttagggaaagagtgtccgcggaactggaacttcgcgggtctgccgccttcactcactcaccttaaccctaccggcagcgggccctcgtgggtttgtgctttccacgcgtgcacacgcacgcgcagaccccggcccttgccccgcctacctccccgagttctggggctcagtcggctctagctctctcctgccgccggcgccactccagaaagctgtgggtacccgggagcggagcgccgcgggtgtgctgggcgccggtggaggggggaacagcgaggattagacgccgggaagcacttccccaacatctgcgagaggtagacacggcggaacctagtgggtcagtcagttccctctccggagattttggggcgcttgcgccactgcggagaggcggcgggatgggtcggatgacctccatcaccacccctcactttgctgaggccatcacccctgggcgttgttcactctcctaaggctgcaccacccacgcagcccccgcgcacctcccgccaccgcagagggttggggtcgtctcagttcccgccccggccgatggggggaggggatgggggaagtggcagagtggctgctgcgccgtcgtctccctggttgccctttcgccgaatccatgcacagagttgtgtaaatgaggccgggcgggctcatttgcatttcatgctaatgagcagatcccctaagtgcctttttttcctggcgggagtctctgctctcattctgagtatgcggcgcctgagtcttgaaccccgtgccgtcttctgggaaaggggggctatttatggttgctccgcgcgtctgacaccttcttccctcccgagaggccgcagtctgccgggtcggcctgcccttcccgccaggatagaggccccggggctggcgcga

SEQ ID NO: 10832 - DNA, 2195 bp, Homo sapiens
cggcagagaggacgccacccacgagagagagtgaccgcggactcccaccgagaggcaggcggtggaggggctcctcttggagaccccgattatggagtggtttcccctccctccagcccgagccgcagcgccgggctcccccacccccccagtccccagccggctcgggtttgaaaactttcagcgaccgagcggagttggcgcggcgtccccagcccgcaggatgtccagtccccccgcctctgccctcgcccactccccgccgtcccgacccgactcttccgggcggcggagcgggaaggcagcagcccttacctgggactcgccgccggccccgctccagcgcagcgtttggggccaactccagccccaggcggggggcgggcgggggtgggagggacgcggcgcggggcgctgggccaggcccggtcctggctgggatggcggggcccgggccgggacgcagggcctgcctctccctgggaccgaggctgagccaggcgcgctgggttgctcgctctcgcgcgggcctgtccccaggcagggctccttgctttcggcgagggtgggctggagcctgcatcaccgttacatcacctccattcagggcgctaatcgggcgcccgccgcgctccaggtacgtgcgctccgtttacacaggaacaaagcctgcccggccctccccgccccgactcacctccaggctgagccgactcgtactttccggctggtgagggagatgggagtttctggccctgccggcgtgtgggttgttgctgttgactgccacgcccccgcatgcgggcgcgcgcacactcacgcgcactcactttctgggctcggccttcgccggggcaattggtgtgagggtgcagccctgcgcaccccccaccgcgtcttccagagagcgcgcctacggacacgcgcggggctaccttggcgcgtctccgtgggggacacctagcctttgtcaccttcgtcctggccctcccgtgagacacacttcaggcacagttcgctgggagcgggccggagcgaggcgcacactcaagacagagtccgtctttgtcacgccttctgcgccccctcccctccccagcttgcacacgtggacacaccgcacaccgaggttcgccttttgcacgcacggtccttctctgggacctccaccagtcaccaagcgtacgtgggatcgtcaccaagcgctcctctcacgcgtgggccgagtccagaccactctggaccgtgggcaaaggtccccctcggcccgactaccccgcgcccgggtttcctgtgaccgttccaggttctgcccaactcggagcgcgctctcccctcccggcgtccccgttccctgctccgacttgtcctaattagccttcacggttttgttccccgaggtacagtgtttagcgcgaccccctgggcctctgcgctccgggacacgttggctctgactccgagtccgtcctttccaggaggtcaggttcccaccagccccaccccccactccctgttccggggtggatctgtgggttgccaccctttcccctccggccccaggaatctgctgaagctggaccgcagaaattgggaagcgaatccaggctggtacttatccagcccgataaacaagagattttccggccgccttcccccggggctgctggcctcgcggggggtggggtgcgcagtcctgggggcccgcagcgaggcctagttagcccgcgccagaggcccgtaggggctgaggcgcacagaggagggagaggttgttgggcctggccagggccctggagacgcggagggagggcagggcgccgagtctcggggtgccggttctcatgacgccgaattgcctgggggatcgccagcggtgcgccggtcggagccagctggtggcggggcgggcggcccggagtgtttgctcaaccctgagcgcccgcgagggggaggggaggcagctggtcacgggctagggggtagcaaggtggaggagcgggggctgggaaaggggagggtatctcccgggctgcttgtttgcgtgcctgccgcggtctacgacaaccgggagtctaaactctatgaatcacccggagttgctggagcgataaacctcaggctggttcctcccctcgcacaccggcttctcggactcctggagggaatgtttgcttagcggccggagctggcgg

SEQ ID NO: 10833 - DNA, 2063 bp, Homo sapiens
cgcttaaagcagaggcggcaaccaggcgctcgggttacgttatctgataacaggacagatgttgtacggctcgttttcctcatacgcattactccgcagtccgcagcaccgttagaaaatccacctgatttcagagccgcagagcgcccaggggtccttctccgcccacccgcagcacgccccgggtttttctcttcccccaaacaacggcaccgggctcctgcaccaaaacacggcgggttcgcgcctgccatcaccagtgcaaaatctgcggggggctgcccggaaaggaccgaatttcaccgctgcatgagttttaaaagggagggggcacatccatcttcagccctccattccactcccgtttgattgtgatgcacaccgggcgtctgcacagccccgtctcacactagcacacacgcgccccggccccggccgcttcccgccgctcccctcaaacccggccggcccggggcctggcgccgcacgcgggtcgctaggggccagcgcccgccccggctcggctcggccgaacaaagggcccgcgaacctcccggcaaagttgcggctgcggcgaggagcgggcggactgccgcgctcacctgggctccgtccccggcggcggcggcggctccgcggggctccggtggcgcgggcctggcggcggcggcggcacgaacaaccgcccgagggcctcgggagtgcgcgggcggcgggggcccgctcagcgccggcgccacggactcaggtcccggcgcgggcggcggcggcggctgcggcggcggcgcgggcgagtgggcggcggcgcgtcccggcaggtccaggtccggccccggcaacgccgcgacgcgtcctcctcctcacgcccggcgggatgcggctccggcggggtccgggtcctaggcggcggcggcggcggcggtggcagctgcggacggctgggcgcggggccgctccgctccctccgcctccggctcgggcgggcccgcggctactgcgacggtgacggcggcgggagcgcggcgggcgctgggactgccctgtcagggggcggcccgggcggcgctcaagactgcgcggcggcggggccggcggcggcggctacggctcccggggccgtcgcgctgaggtgcggagctgccaccgcggccatcttgttgctctaactgacaagaacccccctccccccgcttcagccagacggggcgctcgcgcccccttccccgccccgcgttggcctccaacaggaagtcgtcccggcccctagcacgtgactcccaccgtatctgcataccggagggcgaactggccaatcggcactctgcacctgagctcctcccccgcgcgcccctcccggcccattggctcctcggccaggccacgcctcctcctttccccttaatacccgcccgcgctgtggttccctgcaccgcgcggggagcgcgccggggtgcgagcggtgcgcgctccgagtggccgggacgcgcgccagtcctgggagcttgcactgctcgggggggttacgtggagacttgcgtggtgtcctttaccgccgccgcctgccctccggtccctgggcgctgtggctccgcgttagggtgctggcgggaggggtgccgatccggttctgcgcgtccggtgggttctccgggccagcgccccgcggcgcccgggctttatgctgtaattgcgcccggcggcgcccggcgcccgcaccggcgcgcgtctcgcccgtgccgtgcacacgccctgcaccgccccactttgcacacgcacacgcacacgagtccttggggccctggagcatcgtgctcgcctcgcgcctcccggcccgcccttgcgctcagtcgctccccagggagcgcccagctgcgagcaaaacaagcctcgctgcgaaacagtcccccggggagacagccctttccccggagcacagacaccacaccttcaccgcgcaagccttcggtccgggccgaacccgggcgctccggcgcctacgcaccccacgattcctccccggtgctccgtacgccgccgtgatcctccattccacggctcctcga

SEQ ID NO: 10834 - DNA, 816 bp, Homo sapiens
cgcagcaaagagctccgggcgccctgggggagagcggtcccaagcctcggaaagtgggcagagccccctctcccagggctgagacggcaggcgcggggctcccctcggacccgccccgccaaggggacagtgtaggccgtgccgcgatccagacccgacgcctccgcgggctccgcggcgcccgggctgcctccgccggctgggagcgctcgagtggccctcgggaactcaccgtgaagcaggagggccgggaacaggtatctgagcaggaggcggcgcggccaggacatttccagtcctgctctggggcctcccgcacgccgcgctccgatttggtgcccgggcaactgggcgcgcgctctgccctccgcctccggccgggtgcggccgggccaggccggggcttcaggcggctgccgcgcgccccatgcccggcgggctaggcgcggggctgcggggcgcgcgctctctgggcgccgtcgggcggctgtgggcgccccggcccggtccgcgtcccggcctctctgccgcccgccccgacttctccgcgcccggccccgcgtcccgccccggccgccgcgtgcgccgctctgagctgcagtggccgccaccgccaccgcagctgcagcgtctcttcatatttccagcgcgccgccggccgggcagcctggccgcggcacggaggaggggccctggagggggcggtcgggggaggcgacgccgagccaccgcccccgggcagccgccgccgggggggagcgcggagacttgaaagggcgcgtcgggcaacgcctcccctcctcccactccgggcgc

SEQ ID NO: 10835 - DNA, 368 bp, Homo sapiens
cgtgccgtctgcgtccgtgggctacacacaccccctcttttctcactgcctcctgggcggtgtggatcagctgcagagtgtgatctgcggtcagggagtgccttcccggagttttcgctttcagacccctggtgttaaagacgttctgtgagcgggtggggccgggcgccccagtcacggcggccgccgcctcctcttcccgcaggacgggacagcgcccctgtggatcgcgtcccagatgggccacagcgaggtggtgcgggtgatgctgctgcgcggagccgaccgcgacgctgcgcggaacgtgagtgcccgagtcgcgcggccaaagagcgaagcctcccggcgcgcctgtgtggagaaaacgg

SEQ ID NO: 10836 - DNA, 1411 bp, Homo sapiens
cgtcccccgcgctcctcccgcgcgcggcccctggagtccctgaggcgcgcggccagcccagctcgggcccgcagcaccgggagcagcccgccggccaagcgagcgcgggccggggccggggccggggcctgggggcgccgcccccgggagtctttctgcggcccctgaggagcgagggcgacggcgaggctgaccggggccgaaaccatgaaccgaagttttcacaagtctcagaccttgcgattctacgattgcagcgcagtggaagtcaagagcaaggtaagccccccgcccgccccggcggccctgcgcccagtctcctggctaatgaatggggcgccccgcggagggggactggggcggcgtggaggcgacaggcgccggcgacaactttccagttcgggcgccgcgcgccgctccgcgggacgcgcactggggaccccggccgtccttcccgccccccgcgcggacacaaagcccggcagccgcggcgctcagagggccgagggccatcggacagtccgggcagactctggacccgctccgcgggagctgctcttttgttccacgagtgagaggcgatcggggcgcgccacacattggaggggagggcggcctttccggggcgagttgagggccaggggctgctcggattcggggccgtgggggggctctgggggcccgggccgtgggatggccctggccaaggcgccttcaaggctgcaaaggaggcttgttacctgccaggaggagacttgccgccggctccgagcccggcgtcccccacccgctcggtaccaaacatctaggcaccaggcgcgctcccccgcgcagacccagagcacgcacccggctctcccccggcccagacccagaccacgcctccccgggcgcgtccccgggccagacaccccaccccacccccacgggcgcgcccccaccccagactcccccacctccggacgcgcccccgccccagacccagcccactcccccgggcgcgcccccggctcagacccagacccctcccgagcgcgcccccggatcagacccgtacccagaccacccccacgggcgtgcccggcccctcccgctgcctgcgcccgggcggagcgtgcccgaacttgcgggtcgcgatgcgcgtctgggtaattggctggtaggatctggcgcttctgccctttgcgggggtggttccttcgccgcagatgctattgtttgtgagggtctccttggtggaccccgcgggctgaggaggtgctgcagttgttcggggtcctgcgggagggggcccctcgagtctttcgctggctactctctgggagttgagcggccctttcgccctttctttcttcgcaccccggttctcagagttgtgggaaaggctcctaacggcggagtgggagcccgc

SEQ ID NO: 10837 - DNA, 1487 bp, Homo sapiens
cgggccctgcgactcgcggcggaggcgcacagcaggcgctcaaacgatcgtgggttcagggccccgcgccagcgttcccggggccttctggagagaggcagggtcccgccgccccggttcccgcaggaatcagctggagaaaggcgggcggcttggggctgaacttcctccaccccccatcccccccgccgcctggagcagacacgtcgccgccgcgcccctgggaacggtcagggaagcaagcagaagccgggaagccgcgaaagaggcgagaaagtgcgaccccctccccagatccccggtcccccgtcgaaatccctgtcggccggtcaaaccctagacaatggaagctccacgttttcatcctcattctcccccacaagtccggtcgcgggttcccctcggcccgggaccccggcgccagccccggagtcggagcctgcacgatacgccccctcccgccgctccacttctccacccggagatcgctcaccccctccgccccatccccccatttcccgcttggccggccccgcccgacccggaggcggcgccccctcccctgtcccaggcccaggaaggaggacggcggaggaagtagggggtcctggctgcgggcgcagggatgtgggtcggcgatcggcgtccgagggcgtaaaaaggcggcccgaggactgcgcgcgggcgggcagcgcgggaagccgggaagaaaggagggcgcgcgggggaggaggctgcgggtgcggggcccgaggccggggcgctcactttctcgcgccgctcgcgctcgccgtccagctcccgctgcaggccctgcgcgcggtcttccgcctcgtccgcctgctgctgcagggcctggatcttgcgtttcaccgcctccagggagttgaggccggccatggcgcggaggcgcagaggcgcacgggcagcggcggacgctcggctgggctcggctccggcgagagctgcacagccgcgccccggccccccaagcctttgcctgcgcgggggccgcccccgcctctccccgccccccgggccggctgccgtcggggcgatgaggtcacccggccggaccgccgacgtcagcaccgctgggggagggcctgacgtcggcaccgctggccacagctgctggaaagtgccccttttcgggacttatttggagaaagcgctgggaggcgccgccttctcctcctcctcttcctcctccccctgcggctctccccgccttcccggccccggggctccggcctggccccgccgcgggctcccgcatccctgcacacgtacgtcggaggccttcttctccgtgagctccagcttctcctgcgcgtccttcaggtcctcggaatatttatccagctcgtcctctgtcccttttagtttcttctggaggtgcgtcagctcctcctccacctggggacgacagagcgaggaacgggtcagcctggggggggggtcacgtccccgaggtgcaggggcgg

SEQ ID NO: 10838 - DNA, 602 bp, Homo sapiens
cgcgcaccgctgctgtacctcccttaacgtatccgtaacctccctcaacgtatccgtacctccctcaacgtatccatacctccctcaaggtatccgtaccttcctcaagctatccgcaccaccctctcttccatttcatgcgaagattgtagtcccgcagccctgcgaccagcggccggaagcagctaagatgctactgctcccagcatgccccgcgaggcgcgcacagcacaggccctctctcaaggtcaccacctccactcccgttgtatgctgggattgtagtccggccgccctgtgactaacggctggaaccgcctaagacaccaccccagccagcatggccggcaggagcgcaccgcgctgtctccctccagggatccgcaccgccctacaatcctgctttgtgctgagattgtagtcctgcaggcgtacaactaacaagctgggtgcagataagagactacagctccccgcatcccaagcaaaggtccctcctctacggagcccctccacgcgtccactgcggttccgccgtgccaaggggagcttggctgttcacgggcctcacctgctagcgagaagatagcttggccgggcgg

SEQ ID NO: 10839 - DNA, 628 bp, Homo sapiens
cgcctcaccgagaacagaaagtgcgctccaggtaccacccggattccgtcaaactacattacccagaaggcagtgctacaagggacggaagccgaccccaagccatagacggaaggcgcagaggggcgttcccgtagcggcgtgggcgggacttccggcgtccagtcttcgtccgccgttaggttgcggctgctgtggttgccaacgctacactgggtagaacgccagacaggggccacttttcgagaccgagtagagacggacagtgaggaggataggacccacttacacgcttttatgtcagccgcgatcccacccccacaagcgtctgcaaaacccttcctggggccttggcgacagccctgtgtcctcacggcgcgcagaggcggcgccgcgaaccttgtgtgcattttacacgacggcggggactgaggtccctcgcagcccagagccggagcccggggtcggccgagcccgcaggaccggcttcctcgccgactctcacggcctcacccagccccctgggcccatggcggcgccggcgttggtgagtggagggttccgcagcccgcgcgagctcgggtcaccgcccgcatgcacccatccgctgtaatacggcggatgccgg

SEQ ID NO: 10840 - DNA, 215 bp, Homo sapiens
cggctgcgtattgatcgcacctgtcatgtcccatctcccctaatcgaagctgaaggccggctccgatgcctgctatttttcataattccaccgcagccgacagctccacaaacaccaccgctcgctcagcctccgcctccccgggccggctgccacctcgcgccctcggcctggccctggccccgccggctgcactgcacggcccgtccctccgt

SEQ ID NO: 10841 - DNA, 2638 bp, Homo sapiens; identical to SEQ ID NO: 5586

SEQ ID NO: 10842 - DNA, 2172 bp, Homo sapiens
cgcgcaggctgtgtacgtgtttgtgtgtacgtgtttttcggtgtgtgtttcagtcccagtgtgttggcgcgtgttcgagtacagatacaccgggggtgtttgggtacccgcacatggctgcgggtggggcgcagtggagaggaagcccacacatgcgtgtgctgagatatggccgcatccttgtgctcccccagcccagacgcaggggagaccagcaccgagacacccgagctcgggagcccttcagcggcggccgggcggagcttggctccacgtggggctggagagcacgcaagcctggagtctcggcgctcgcttctcggctgccgccggcttttgtagaaccgagtggccggatggcagctcgcggggaggctcggccacccgcccggctcgcccggggcggggagaagaaggagagctggagagagaaccggccgcggcggtcggagaggcgagcggagtgcaagagaggcgagcgcccctgcccggcgcccgggcgcgctctccgccttccccgcccggctcgcctgctcgctggctccctccctctctccctcccccttcctccttggccctgcctcctccctcgatccccggctggatgactgaggcatttcagacgtgggctgaaccagagcgagcgagcgagctcaggggctgcagcgatctctcgataagccacctagaggcgactctgtgcgcgcgcgctccccagtggctcccgcccgccctctgatcatgttgacatattcacaggacaggcagtagtaccgatgcggcgctgcgacgttacagtttccgacaccttctttttataactcagctctatcccccagcactcgacctgtgaaaaccacgcctatgcagcaacacaattggtccgaaagcgtcaaagagccaatcaagaggcctccggctccccgcagcccacagcgcagcccgaccttctagagccgccgagcagacgcccggtgaattctagaggcggcggagggtggcgaggagctctcgctttctctcgctccctccctctccgactccgtctctctctctctctctctctctcccctccctctctttccctctgttccattttttccccctctaaatcctccctgccctgcgcgcctggacacagatttaggaagcgaattcgctcacgttttaggacaaggaagagagagaggcacgggagaagagcccagcaagatttggattgaaaccgagacaccctccggaggctcggagcagaggaaggaggaggagggcggcgaacggaagccagtttgcaattcaagttttgatagcgctggtagaagggggtttaaatcagatttttttttttttaaaggagagagactttttccgctctctcgctccctgttaaagccgggtctagcacagctgcagacgccaccagcgagaaagagggagaggaagacagatagggggcgggggaagaagaaaaagaaaggtaaaaagtcttctaggagaacctttcacatttgcaacaaaagacctaggggctggagagagattcctgggacgcagggctggagtgtctatttcgagctcagcggcagggctcgggcgcgagtcgagaccctgctcgctcctctcgcttctgaaaccgacgttcaggagcggctttttaaaaacgcaaggcacaaggacggtcacccgcgcgactatgtttgctgatttttcgccttgccctctttaaaagcggcctcccattctccaaaagacacttcccctcctccctttgaagtgcattagttgtgatttctgcctccttttcttttttctttcttttttgttttgctttttccccccttttgaattatgtgctgctgttaaacaacaacaaaaaaacaacaaaacacagcagctgcggacttgtccccggctggagcccagcgccccgcctggagtggatgagcctctccatgagagatccggtcattcctgggacaagcatggcctaccatccgttcctacctcaccgggcgccggacttcgccatgagcgcggtgctgggtcaccagccgccgttcttccccgcgctgacgctgcctcccaacggcgcggcggcgctctcgctgccgggcgccctggccaagccgatcatggatcaattggtgggggcggccgagaccggcatcccgt

SEQ ID NO: 10843 - DNA, 2548 bp, Homo sapiens
cggagctgcagtagaagcgcttccgacctcgtccaggccctcagcctatcccctcctgaaggtcggcagggggcgtcattaccgttggcttctccgcgcggctccggcctccgcttcgggaaccgagtgcctgcagcccgcgatcctggggaggcacagggttagggtaccgcctcggcggagaaagtggctgtgccgcgcgggtggggccgggccagggctgggctgggctggagggcgcggggtacctgagtgaagccgcagctcccgggcggggtgcagaggagactccctgagcgctggagcggggagagccagggcgggggccaggcgccgcagtcccggacgaggcccgagcagctcctgcgcgttccgcagcaggcccagcagcgtgtgcgccagcgagcgcagctctgcggaccggacaggagtcggagcggcggtcagaggctggccaggccccctcccctctgccccccgtccgggtccgggtgaacagaactgaccgcatcgccgccggcgctgcaggcactgctggtgcgccaggcgcgcacaggcgccctgggaccccgggcacaggcgggcatagaaggcgcagagccgggcggcgtctgcctgcagctcctggggggggtcccaggccagaagctccctgcagctgggctcgcggctggaggaggctgctgcgggcgggacaggggtcagctcaccctctgtttggggccctagccccctcactccttccccggaaggagacaggctttcccgaggcagaagggagctgggaatgggcatgggccgggtggaaacgggcttgtcccacggttgtccgttggggcactggggacggggcattggaaagagggcgctcaccgctcatctgctcctggagccagtccttgaacactgccacgcgggtgtagaccccgggcttccctggctccccgcagccgtccccccaggaggtgactccgaacaggacctctctagggcgggggccaggctcagaacaggtcagggggcctcccgagtcaccctgcggggccaagagagaggacgctgcattcacctgccccctatgacgcctgccttacgcctggcaggtgtgagcttgccacttgtgtccattttagggatgaggacagagaggctcagagaagtcgagtgacagacagacgtggaaggaaaagaggccgtagtggccctgggaaggctcagccggccttttctcatcagactgggttcatacctggcacgagtcaacgccccccgccaggtacccggcgcagagcatggtgctggggcgcagcccgggccccagggctcttcggcaggtgtcggtgctgagcaggggaacacgggcctctctcactgcttcagcctcaggcccgtctgcagggaaggggtggaaggctcaggtttggagggcaagagccccgccttgagggtccccttcccaccaccccccttgattcctccccctttgaaagagcaggcagcatttttccaaggcaacccggcctccctacactctattacctcggacccccagttcttcccaccacgcgccggctcacccacgcccagtaccttcgaagagggcgccccagcccgcgatggcgcaggcggttccggcagggggctcctggggctcctggggcaggcacacggggcgcgccgatccccccgggctcaccggcgtccacagctgcaccagggccaggtcgttgtggaaggtccgcgggtcaaactgaggagggggaggcggcgcagggtcaaggaagcacgggtgggggtgcggtgcccagccttgggggcctggggactgccttctcaccttggggtggggcaggatgcggttcactggcacctcctccgcttgctccccccgggacccctctgccagcgtcacagtccacagaagctcattcggggcgctgcgggtcgagcggcagctgagacgcaggaaggacaggggcacaccccgcaggcccctcggagaccctgcccctccgcccgcatgccgggctttctccacctgggggcacggagggcgggccggggaggggtcccgtcccagagggggcgaactcgcccggccgtgccaccccctccgggctggcatcctggcggggcgggcgcggcgccttgagatggggaagcccggggccggccgccgccagggggcagcagagaccacctttcccgcgcgtcgcccgccggacaacccggcaggtgcggggcccagcgccggggaccccagctgggcaaggcctgggggtcctacttaccctacaaagcagtgcgctgccgtgagcacccaggaggccgctaccaggacgccgccgcacagaggctgcccgccgagctgcagcctcaccagccagggccaggccccgggcggcgccgcgctgccccccacgatgcggccgtgggcccgcgtcacattggcagtgctcggacgcctctcgccgcacggccctagaaaggggcaaggggtgtcacgagggacatgttctggccatcctcgccttcgaggcccacccgg

SEQ ID NO: 10844 - DNA, 919 bp, Homo sapiens
cggtggggtgtgaacgggcggaagccccgtccagtgcctgtttaaccacctccagcttgtggaggccgagcgaatgcgggtgtggggtccgggccggggtacactcacgcgttgcgctggcaccgggactggatgcagatgagcaggcgcaggtggtcccgggggcgcggcggccccctcctcggcggctccccgagcgctgcgggggagggtgggacgtggtcaagcgggcgggcggcggggtgggcgacagagcgggcgatcctcccacgccccgggcctcacccacgtgcagcgtggcggcgagagcgtagaagccagccacgggcgccctgtactggccgctggtcaagttcaggcccgggccgcggcggaaggcaccctcggcgtcgggctgcgaggggcacggatggtcaccccggctcccgcccggccggactcacccgccctcccgcgcgccggcactcaccaggtagtagacgccaagctcgtgcagcgcgcgccgctccaccaacgcgtcccggcgcaggcggcagaggaaagcggcctccacgcgcggcgcccgcggccccggggccaggggcgcggccagcagtgccagcacgtcccccaccacgtcgtcgtcgtcctccccggcggtggccgagaccggggcgaggctcgcagcgaccggcccggcggggccacacgtacagggttcgggctccgcgcgctcccgctgccgcaccgcacctggcacagagcgagcggtggccgcgcgccagggacccctcacccgcccgccgcgtgggtccagccctgaacgacaggtgctagcgagaccaggggcctgccgggcgcaggggtggggcgagggcgacgtcccctcggcctgaagggcctcggagtctttgcgtcctgaccctgcagcggctcccgt

SEQ ID NO: 10845 - DNA, 2488 bp, Homo sapiens
cgggccgagtccgaggttgctcggaggtccagggctcccaccccgcgatgccagtcctgcctcctcctgcgccccgggcaagggtctgtccgcctgggggaccgcatctggaatccgcgtggctcccctccccggcggtgccgtctccacggacagtgcgtgcccgggtctgggctggagcgacgtccccgagattatcctattactttacaactgtggctcgcgcgccgtcaggacccggcccggtgtgggctggcggagcacaatgaccggcggcggggcgggggcgggcacgcgggcggcgggcgctgggggtcgcgtagatgtttgggtcgaacaggtgagcgcctcccggacactcgggtgcccgcggggggcggggaggagggcggagggggtgtaaactaagtggtgggaaagagacaaaggaagagtgaagagcgagacggtgcggatggggaagggggaggggcgcggaggggcagccggtgggcagcgcgccgaggagctcgagcttgaacttgatcaagcactgggggccctgccgtgggggtggggcgggggtacggccgagagccggccacgtgcctggctttcccagcccggggtctcgctccggccgcccgggggagccgaaccccgaggcccggcagccccgccccacaagtacccgcgtccctggggacccgaaagacgcatgggggtcgaaggctgcccgaaggggccccgggcgccgagagttcctgagggtgcctgagtcactttatttgggccaagtctccctctcctggcctgaccgcagacagcccgccgggtgccctctccccccagcccccaccggacccagagaccgcagcctccgggagcgatgggtaggcacagatcccagcgccttctttccgggctcagccccgtgcaaggatcttcctcgaagcgcttcccccttaagagcgcgctccccaccgaagcgcacggcggcgcgtccagcgcgcccttatccccccctacctggcccagctccccctccttcctcctcttctccccccgcgcctctctccctcctttctcctctcccctctccctgggtgcctccttttcctctctccccttccccccgtgcccactcctccctctcacccgcccctccgccacctcctcctgctgctcctcctactccccctgcctgcgccctccctgcgctcccctcccccccgcccccgccccgtgcccggtcccgccccctctcccgcctccccgtgcccggtgccccctcccccttcctccgggccgcggcgccgccgccgctgccgccgctgctcgcctgggccctcctcctggccacccccgcccccgggccgggcagtgacgcgccgcggtggtgccagcccctctccccgggcagccgcggcggcagcagcagcagcagcagctggagctgtggggctgtcaccgccgcccgccccgctcactcgcggatcccgaccgcccatctccgcctcgcttccagcccaggtacggagtccggcccggatcccggcgatcgggccgtttccggggcccgggccgccgccccccttctccggctgctgccgccggccgttgagctgcggttaggggggcgaggggctgggggcggttctggggaggggggcgcagggggagcttcctttgccggggctgagggagggggcgcgggggagcggctgcgccctgggccgagtgggctggggcggggggcgggtgagtgtgcccgagagtggagggggggcgatgaaggctgcactgtgggggccgcggggcgcccaagaggtgtgtctggccctgagcgcccagggtcgcggggcgcaccccactcccggggtgcgcgccgcgggtcctggggggcggtgattgtgcgcgcagcgccgcggtattgtgccacggccgctcggtgtgcagcgggctcggcaccgcgtcccggcgagggaggcgttctctggcggcggggcgggggccgggctcgggttgccgcggccgccacgagaagggaagtggactgtgtttggggatgtgaggacgggaagcgttgagtgtcagggaggggttccccggcgcggcgcggggagttgagacgcggtttgcagagttgagcccacttcagcaggcccgggtccctcccgggaggggacggggtgtccctctcaggtgcaccgtctgaccggaagccgcgggcgttggcggcccctggcgaaggggccttccttaatgaggggacacggcggggcgggggcagccggccgcctcgagggcgcgcgcaggggttaagttggatttacacctccgccctctctctcctccctccaccttgtcttcaaggctggacactttggatagggaggaggggggagtgcaatccgcatttttattccagccgctcgggagcagaagtgaccctgctcccacccggagctgcgtttgcccgagtccggccgcccctaccgggctgcgc

SEQ ID NO: 10846 - DNA, 513 bp, Homo sapiens
cggccgggcttgtcacggggctctgtgcagccttttccactctcccggctgccagcgtcccgccccgtcccctcccagcccccaagggaggaggggagagctgcagagaggaggaggggtcggggaggccggctttataaaggcggctggaacaaccctgcccgccagaccccgtcgcccggatcccctgagctgcccgccatcccacgtgaccgcgccgccccccagctccaccgctgagtgagttggggcgcgtccctatcccgttcccagtccctcgccgagccgcgtggtgcactgaagccggcgtggggaggagagccgatgaaggagaacgctaacatgggggctccaggcagaatctctaatgggagagatttaggacctgagggagccgggagacccgggagcccacggtctggtcggccacctcctctcctccccgggcgcgaggcctatgagaccgcaagccaccctccaagaatgcgcgtgcagtcgttgccgtggcaacgt

SEQ ID NO: 10847 - DNA, 1766 bp, Homo sapiens
cgctctttgcccacccgcgtcaggccggtccccctccggcctcttctgtggcgcgagggacagcggaaaccacggtagacagcacccccttgagtccaattcctcccctttcggaggaagccggtttctcctttctatgctactcccgggccatttctggacaacagctgctattttcacttgagccgaagttaatttctcggggagttctcgggcgcgcacaggcagctcggtttgccctgcgattgagctgcgggtcgcggccggcgccggcctctccaatggcaaatgtgtgtggctggaggcgagcgcgaggctttcggcaaaggcagtcgagtgtttgcagaccggggcgagtcctgtgaaagcagataaaagaaaacatttattaacgtgtcattacgaggggagcgcccggccggggctgtcgcactccccgcggaacatttggctccctccagctccgagagaggagaagaagaaagcggaaaagaggcagattcacgtcgtttccagccaagtggacctgatcgatggccctcctgaatttatcacgatatttgatttattagcgatgccccctggtttgtgtgttacgcacacacacgtgcacacaaggctctggctcgcttccctccctcgtttccagctcctgggcgaatcccacatctgtttcaactctccgccgagggcgagcaggagcgagagtgtgtcgagtgagtgtgcgtctgtgtgtcccggcgagggtgcgcgctcggcgccgggagcgcggccagccgagtccggaggcatcgggaggtcgagagccgccgggaccccagctctgcgttcactgccccgtccggagctggacttcggggccggggccggggccgtgcgccggggacaggcagggccgggtcgcgggccgcgcgtcccccaggccggaggtaaaagcgctagcgcgcggagggctcgaggagggcaccgcggctgggccccccgcgccccgggccccagccgtccgcggctcccggcccgacgctccccgccccggagcgcgcccgcctcccctgcgtggaggccggcgggcaggcgagcggggggcggtagcgccgtgccaaggggctggctggggcagcgtggccggccgggctggggcgatttaagagcggtccgggcggggtgcggagccggactttggctggggcggcgcgcggggagggggccgggggcggtggcggcggcgttggggggcggggaggaggcaggaggaggagcagcagcgctcgccgggggatgcagcagcggcagcggcggcggcggcggcggcagcggcagcggcggcgcggagtcccctgcgcccagcggcccggccgggctgcggcagaggcggcggcggcgccccgctccgggtgaggttgccggggccgtgcgcgctggtgagtggggcgtggggggcaggtgggtggctgggggacgcggggctcgggcgggggctcgcggcggccggagccttccccggcgtgagcccggccgcgagcgccgcccaggtgagccggggctggtccggaccgcccggctccagccccagcgctgcttgcggaggtgggtccgggcgggcgggagggaggctccggcgccggccgtccgcagagggatgacctgtttgaccccgctggctggcgggcgggcgaggacttcccgccgcgcccctgacccgcggacacggcacaccgagcacaggcggccccgggtaggggagcgcgcctgggccggccatccgc

SEQ ID NO: 10848 - DNA, 6511 bp, Homo sapiens
cgtagggtgaacaggtccggtcaggagccgcagcgccgctcacctgcacctcgtccatctggtgaggcatgtcgtggagccccaggttctcggccaggcccgcggcatccagggcgtgtgcgtggggcagcagcaggtcggagcggcggtaggcatccctgcgggcgctcaccgcgcccgcctccagcccggagaggtggggcagtaggccggccgggcgcccgtggtgcgagggcagccccgctccctcctggctctggcggccgggccaggcctgctgctggctgcctgtgggcgccggctggtgcagggggttgatggcggcggcgtacgcttcccccagatgcgagtaggggtcggccgactgggagtaggccagctgctggtagggagggggaaagtagggtggcggctgatattcggcgactccagtgtgggagaggggtggcgcggggctgtagaggtgctgcccggcggaggagaggtgggggacccgcggattcccattgctgctcccgtcgtggcgatcctggagggaaaaaaaaaaacaggagaccccgttagtgcgaaaccccgctactgcgaactggccggcatcgccgggctacgcagagggccccgggggaccaaccgcaccccgcccggcggggcttgcccagggtcggaaggtacccgggggcaatgcgccccgaggatttcgttgtaagcaaagagtgcggggagggaggagagtctggtgaaagacctgggggaacgagttctcaaagcccggcggcgaaggtctaggcgctgctcccaagcccgaggcgcttggaggcgccaagtccgaaccctgggtcttgggccagaaaagtccgtggccggagcccggggcgaaggagccagagcccggggcgaaggagccggacgcccggtgcagagctatctcgtggagcccgcccatgacgcagggactgctggaggtggcagcgcggcaggcgcggatagagtgcgcggcgcgggaaatgcgcacctcccccgcccccgggaccctcccttccacgccctcgggacaaagacctccgagcgggcggcgctcggaaagcagggcccgccaccctgcgccgccctgggaagtgaagagggagcgcgcgcacagggcggccctccctgctggccgggcccagccgaggggagtaataagtgggggcgccctgcactgccaagggcagtgttctcgcacgtcggggcgcagagggggcatgaagaaccctggaaattgggcagccttgcccgcgcacgttccctcgcccctgggcggcccgactcagtttctaaaggatgcgtccccatctgcccaggggtctcggggcgccgggaacctggaggaacatggcgctgtcgcctcctggcggaagcgcccgggcctgcgggcaggggcagccctccagggcccggaggcgcagtgaactcccgcgagtccgtagcccgagctccgcgctcccggcgcccctgagctcgcctagcgctgcctgcgtcttcttcctcttcccgctcgccgcctccttcttccctcccactctccgaaactctagctcaacctgtccgacaggctggagcactcgcgagctcttacggccccatctggcctcgggcacccccaccaccactccccagcccccacttcttttgaaagccaaacttcggttgttttcgtgcttccccgaggaggtagcggggcaggtgacaagccggccttggaggagtgtccgccaaggtgtcgctagcaggtagcctcatctgacccctttggacagagacttcgtgcgtaaaagccacgtctgagggttgcagacggggcacttttccgagaaaacgggaagcagggctgtttgccgcttaggaaagcgcccggtaagctgtgtgggtgggatttgccattctctttccaggcctcgttcccgaggggaggctatttaggaaaaggccctatacaggaaaggggccccgcagaaatggactaaggggtgtccggagaagtggatcccgtcccaccgagaggccagggctcctatgccctcgtccccgacctcggtccagtggcccctgcctcccggactgtcctcggcggggcggggctgcaccccggagccccagctcacctcgcagtcctcttcgtacttgacattatcggttattttccacaacatggcgtccggcgtcccccaaaacagtcgccagttaaatccaggatccccccagcccccaagcggtaaatccaaaatcggggtcacggtgaccaggcgtctgccgccgcccccgccgcgcgcgggccttgctgtccgggtcactggacacgcatcggcggctctgcgagcgtagatgctgccgccgcgagtgtcaagaccgctccgcggacggggaaagccgcgcccgaacagtgtgtcctggcgatagccgggggacccgagcgccttaatgagaaggaaattatcataactcctccccgggggccggcgcggaggcccaggcgccgggcggggcggcccccagccagtcccagcctagctccgccccgcacccgggcctggcgcagcgccgagccccacgctgtgagggacgaagcgcggagtcagtgggcggtgcctcgttgacagccgaagacctgcgaggcctgggtcccccgacgcgccttccttctgtcacctccaccgtaaacacacctgagattggcagagctgggggaagggatccaaatactgaaacccacccctctttcgcctaaacggccttcactcgttcctccaaaagacggatgtcacctggagttaagaaactgcgcatttggggagcgactcaacaaccggggtctcctcatctcctaaaaacacatcccatcccacctacaccccactgaggcttaaggtctgagctgggatcatgcagctggagccccagtgcgccagagacgcccagttccctccgtgggcacagcgcggtcccggcccccgggcgggaggagagaggaagggactcctggggagtctgccccaagggccgcagaggcagcagacggtcctacccgcccaggagttgcggacagcggcgtctcgccgctgtcgcccgaagtggcatctcccgcggctggctgaggccagggggaacccgcgcgcactggaccagcccagcggcccggccctgccctgccctgcggaacgccggctctgcagctgcctctggcgggccggtcactcagaagcctctactcgccctgggaaagaagcgccgggcaggaataaaacccgagcgccacgggtaaggtgagggtgaggaggtgcaggaagttgggagagagcctgcagagagctctcgactggagaggtagacacccaggtcccacatgtttagacagaaaacgaaacttccttccacacaaacgctgcttccctctccccttcggtacttgccacccaaacttgaaagcaaagtgcaatactaatttttaaaatttaaactaacgaaattctttggcccagttattatgcagcaattgactttcattgtaaggggaacatcgctaattctcgagggcgtatttgttgggacgccccaactggctccctgggctggatttaaacattctgtggggattagaggacaagactatttctatttgatactgaatacgattttgcaataatcaatgcctatcagtacggtgtccgcacctgcagtagacatgactctcccatccacggaatggcggcatccactgcctcgctgttccttctcgggttcgtttgaactttagcatttatttagacccaggtgggcctaaaagaaaataataataataggcgtcctccaagggaaactttcccccggccttagacagcagccaaatcccaggtgattttccgaccggacgcgggaacaaaatctggaagttgaaaccactgagacttttcggccaagcatatctgcagggctttgcactaaggagaacagtgcataaaaagacacacaggaccctgacacttcggtcccaaaacaggcttctgggggtaaaataagttaccgcagaagcagcgctcctggtattagcggcgggggagggggacacctgccagaagcagaaattagacccaggcccgcaggcactccagagcacaggtccaggaagatgggtcctagactcgccagaggtgcggcgcctctttcgggcgcctgggactccctgacgggtgccgctgggctgtccgacattctgggccttctagccctcggttttattctctgacccggcctgaggtgcagcttgaacaagctgtcttgtctgtgctggcaagtttacctcctgcacgctggggcccggaatgggcaagaaggtgctcatcccccatcccaggccctggctctcctttcccacagcaacactagccaaagctgcccggaggaaccgatatgcctccccgcctgggagcgtctacgcaggaggcgaagggagccgatgggcactgagggctcgcgcagcaccgtgccgtgggcccaaaggacccagaggatccggaaccgcttggcaaaggccattcattcccaaggagcttccctggaccccggcgctgccctctttccaatgggtaagcgttcgaactggagcgcaacctccgcgccctctgtacggaaggcagctagaacaaatcctctgtcttctcggcacgggagacccttccccaatacgcacattctcggcttctgggccggcacccaggcacgcgcgcgcccttgtgaggaagcctcaacccttccttgacttcaacttttctgctcagcagagccgggaaccgaaggctccagcatccaagacagcctccctccaacgtccccgccccttgcccacgtgaagacgcggactgcgtggccgcgctcaagacagccggcaccggcagaaggggacccctctggaaccccggaggcctcgcagccgcctggagaagaggatggaaggttgtcgggggttcccctctaccgccccctagggagcctaaactcacttactccctggaagccctggacccacgcccctatgaaaccgcaaaccaggcctctgcaacagcgggagcgccccaacagcgcgccacttccaaagaggcgcgaggtggtgcctttggaaacagggctcccggccccaggcctgagtcatccgccacccctgcccccaccccagacggaagaaggcggccaggcgggtagagcaagattcgggcagatctgcgactcctcttcccgccccagggaggggactcccgagcagaagatggaggcccccgagcgctttcgcagactccgcgccacgcgccggacgtttgtcccgcctctcgggacaacgtgagcgccggtagggacctcagtaagtggcagacccgccaggatcaagcaaggtggaaaggccggggcctgcggcaaacccaggaggagggggcattcacgcccgccaccctcccttcgcggcactggcacccactggaccgacactggcgtcaaagggcaccctgaagtatctatgtccagtaagggcatgccctggggcaccacagacatcaagtcacagccactccaaaataattacaaaaatgattatcgtaaataacagattgctttaatagggcgcgaagcggccgccgcatacagacgcctctggtctcagtcccaccagattcagttcactgctcgcttctttgcgctccgcgtcaggccgcatgctcttcgtttagaaccttttgagccttaactcttcctctcaaacaactccttttttcaaacaggcaaagtgaggcgaggagctgaggggctcacaggttcccaagcttccgaggagggcccgggtccacgtcagtcccggcccgccaaacgagacttcgtgggcacagtctctaacctgacaaccacctgtcccatttcacagcaggcaaaagtgaatttttagtcgcccaactacctgaaagccacaaaggtgcctagggttgaaggccactttcctagcggttctactagggagcccgttagagacatgcctgactctccccctgccctgccccgggggggacccccgcccgccggaggcctcacacgcttggccgtgggatggtagactcctgtcacctctccactaacatcccggagcccatccgtacgcaccctaaccgctcggagcgcaggcccgaggactaaggcggtagcctcgtgtcccctgaggccttctccgctccgtgttctgggtcgccatacacttcccggctaagcccggcgcctttaactcagaacttggtcgcctccaggcgtggagcaggccactgttgccagacgctgcgcggacccgtcttcctgcgccagtactgggcgacaggcagcccgggcagcacccaggagccaccctgcacggccccaggcgcccgtcccacccagcgccacccctcgcccttcgcagcgagtcctcccgcagcctctcctctctgctagcccccggggtcgc

SEQ ID NO: 10849 - DNA, 6511 bp, Homo sapiens; identical to SEQ ID NO: 10848

SEQ ID NO: 10850 - DNA, 338 bp, Homo sapiens
cggaaacctccaatccgcgaccccggcgggtgcaccgccgagccccccgggaagtgtagttccagcgcgagcgggacgctgggaaatgtagttctgcgcgttcacgtccccgatcgggccgtgtccgccgcggccctgcgaggtccgaggggtaagggagcgtgcagcgggggcgggaccacgaggcggcggggctgggggcggcctctgtgtctgcgccggggatcgcggtgaccccgctgcggaccggctcgcggtgaccccagcgcgaacgagctggctgccggctggggcgagaaaggcctgcggaccggcctgggcgcatgcgcggaaggcgg

SEQ ID NO: 10851 - DNA, 936 bp, Homo sapiens
cgcaggcgcggggtgtcttgagtccctcaatccccagagggaaggagcccaccgtgggggaccggccaaagccccactctttgtccggcccagggcaaatcggcccctcggcagctcagcccgtccagcccctcccgagaggacacaggggacccggagtccgcaggggccagcactaccctccgccccgggtcccgctccctactccccgtcgctccgagacgctccgactctcagtccggaggtgagggtctcccttcatgcacgggcgcctgatgggggtaggggtggggacgcacgagagtcccaggcttcggcccggaccgctcggggttccaacgcccccttcccgggcccaggaacagcgcccccgcaggaagcatctgcctcggagggggccctcgggatgcaccccgccgtgtccgcgtccgatgcccgctcctccagggccccgcgacccctggggatcccccgctccccggcctagggggcacccactccgcacgtggagcccgggcagcgtccccagacgcacccagcgggataccggagaggacgccgacgcagtgcaacgccccggccgaagcgccgaacaacatgcgcgcgtcgcggaggaggtgcggggcgtgctcgctcaggcagcgggtcgccccgacgtggtagaagcccaggaagccgcagcccgcgaaggacaagctccagccgcgctctgcgtcgtacatggcggcggcggcggggcgggggcgcgggttaggatctgggtcgggatcgggaatcggctcgggtcctgatccgcagcagctccgcccggcgcccgcaagcgctctctaccctgcctcagtgtctcggccagggcattcccagcgcgacgtcagccccgcccccctcggaccatgcaaatgagccggcgggaggcccaatgagcgggcaggacgc

SEQ ID NO: 10852 - DNA, 2184 bp, Homo sapiens
cgccacgacggggacctcaccacgttgtccctcatccacgtcacccgcccaacccacgcggagggtcctgagggcttcaccacgcagccctgaaggggcagagctggggtcacacaggtatcggaagcccacgctgtggccccaggagaaggttctggatgtggctcctatgagtgaagggtggactcacagcgctgccggaataaagggaaaccacaggcaggagggaagcgcgtccaggatccgcggccaccggcctctcagactgtcttctggggccaggtcgcgaggagatggaaagcgggggcatcacaggctcgtctgaacccgcgcgttcattcggccacaccgaccccaaacccctgcatgcgggcaggacccctggttctcctgcgcccaccccagccctgctggccgccggggcatttgagggatggttgcggggggtcggagggtggaaggggcgtcgggcagcctcggtggggaggggaagaggcttcccgtgcactatggactcccgcattcgggaagggaggcgctcggggttggggagggaggaaaaggcggctgtgttcggggagggggcagcgagaccccgcccgggctacgggttgcaggatggagcggacgggaggaaggagccctgacgccgcggaccccacgcctgccggccgtcccctccctccctgccttccttccttcctccctctccgcagaggcagcgcggggacccggccggggtggggctagggcggtgcgccccggagcctccaacctggaccccaccccggaggcgccgcgaccgcgctcccgccgcctccaggaaggtgcccggatcgcgccggcgaccggaggactctgcgccccgccgcctcccaccctgtcccgccccgcgcctgtcggcgaccccgcggggccggtccccgtctccacctgcagtccggggcgcggcgcccttgagggaagcggggctctgggatcccccggcctgggcgtgggacaccccacggtccgcacgaaccttggtggcccgggcccctgctcccccagaacagcgcccaggtctcggagaaaccccccgaagccgtgggcccagacgctcccgggggacctcggtgggacgggcagggcgggcgccgcgggcgaggggacgcgcactgtccccgggcgaaccagaaacaccccacaccgggcacctccccaggaatcgcccacccacccccattgttctccaccaggtttcaccttaccaccctccccccaggcatctcccccgttgcatcgcccccacgcgggcatcgctcccacccgggcatctcggctctgtcctgccctggggtggccgcagcccgcggggaggaagcgcggcgaggcgcccacaccgggaaagtgtctccgtgactctgcgaggttacactccgggtgcgtcgctgcgggctcgtgggctcgtgggctgcagccccccgctcctgtcgggtggacgagccccgggcccgcgtggagctgctcggtcaaggccggcccgggaggggcgcggcgcagggcgggcaggggcggggtcctaggtcaacgtccagccccagacccagccccgccgccggatccaccgtgcctctgtttccccattcctgagaaatcggaacgccggcggcacccccttctccgggccggagcctgcgccctccggattgcgcgcctctgtccaggcggcggccgggggtgggagcgcgcagcgggccaacttccctaaagggaactgtcgggagggcgcccagaagggaaagaccaggaagcgctgggtgctgagctggagtctggccccttcctgggggaccggggagggggctgaaggtggggagaagaccgccggggctgctaggggggcactgagggagcgtccagggggagaactctgggtgggcgacgccgcaggggagctgcctggcaggggcgagggcctcggggaagtggagcttctggccgagagctgcatctgtggccggggagggaaagggtcacaagggcagtgcgcgccgggagggaagctcaggccggggggaagggactgcgcggcggggacaggtgcgtcgggtgctggacagtgagcaggagcccgccggtgctcaggtcacgaaggtgctggagccgggggagctggaacgcaagggggttaagggaacgcgc

SEQ ID NO: 10853 - DNA, 413 bp, Homo sapiens
cggcctgacggcggggccgagcaggggaagtggaaggatggagggagaaagggagagagttccagccgccccggctgtggcaggaggagccccaagagcgctccccgagcccgccccgcacctccaggctcagcccggcgcaggctccctctcccgccccctccacccccgccagctgctgaaacccccccaccgtccctccgcgggcaacagtgcccgccaggcgccgccgcgcggtgcctcgccccccacgtcgcccgcccggaaagagcccgcagtggcccggggcgccgcgccctgaccgacgtctctggggtctgggagggcggcgctgagagctgggagaggcgctgagcctcccggtctccacgggacgccgggaaaggagagcgagcgcaactcccacgccccgg

SEQ ID NO: 10854 - DNA, 403 bp, Homo sapiens
cggctcgcgccgccgtgtcctctacccggctacacagcgactccaaaagtttagctttcaccccgcggagatttcgacagctctgggaggctctttttaaaagggaatttggagaaatctgttgctgagcacgattgagtcccactctataaaatacccatcaccccgccgtcattcctcaagtttacgctttcaaatatgcgaaccccaaggtccagcccgggagtaagccaatcccaggacccggtccaccggcgcgtgtcttgaaaagaatgtcggaggtcagattctctcctaccgcttagaggcctcggctcagcgcacacatttggggttcgcagggcttccgcgcgccggaacccgacctgcgctggattttcttccgggcgcaggagctaagcga

SEQ ID NO: 10855 - DNA, 675 bp, Homo sapiens
cgtctcatcgcactccagtggagtgtcgcgaagttgcaactcggccccaaggcggcccgcacttccacccgcacacaaaggcaggtcgcagccccgcacgcggggacagggccagcaaggggcggggaccctcggggccgccgcctccgcagccccgcgtgtgggaccctggggcgggccgccatcttgtggtgcggccgccgcctgccaggagacacctagcaactccgcagcggccatcttttacaagaaaccttcgctgcaaccgctgcgtcacatcaccgcgtctcccagggacaggaaagcctctccgtgtttggtgaagcttcaggggaagcagtcatcctgtcgtcgcatacggcaaaatcctccattgccgtagccgttcggctgacgtgacaagggaggtgcaggccaacacggcgactccgcgccctctggcggcagtgccggagcagcggcgctgtctttgacctatccggcattcggcttccgggaccgcttggcggctgtgaatgcagagctggggcgacgtggggctcgcttcctgggactgggtgtgagcttgcgcagtgagccatatgggggtcatggcctggcgtgggggcgtggccgggtggggccgctggatttggtgctggaaagctagggaagtagtcgtgcgtttaagaacgg

SEQ ID NO: 10856 - DNA, 580 bp, Homo sapiens
cgaagagttcggccaacaaagcaaacgtcccgtctccggtctcctcttcctttgtaggggaaacgaactgaacgtctgaaacgaaggtggcgcggcctggacaaacctgacccttcgacatcccccgcccctgcgcccgccctcgctaagcggggaggagcgaccgctacaatggatcctcccgcaggctttgtgcgcgctgggaatccagctgtcgccgccccgcagagccccctgtccccggagggcgctcatttccgggccgcccaccacccgcgtagcaccggcagccgctgtcccggcagtctccagccgtcccgcccgcttgtggccaactggctccagtcactccccgaaatgccagtcgacttcactgggtactggaagatgttggtcaacgagaatttcgaggagtacctgcgcgccctcggtaagcgctgcccgctgcgccctgggcgccccgccgagcagctccgggccgctccctagagccctcccgagacgctgcctgcctgcctccatcccggcgagccgcggtccggtgcccccggacgccagaaagggcgtcctcggccaccgc

SEQ ID NO: 10857 - DNA, 858 bp, Homo sapiens
cgggaacaccgccctcccgccagactcccggcggctcctcctccctctcccaaacccactcccaaagctaagtgcaggcttccccgttccagccagaagcgctgcgtgagcctccacacgtagccgcaggcagctccttaaatagcgtccgcgctgagcaaacagtccagacgtggggcccaggagggcgagctgaggcgaccgcaccgggcgcgcagcggcggcgggtcagccggcggccaatagccagggcgcggcccgccccgtcgcctcccctcggggagcctataaggcctccgcagcgccccgggcgcctgctgctccgtgcctccaccgacgacctcactcagctgcgttacgcgccgctccggctgccggccgcgcgccttgcccgccggctcccgcccgcaatcggcggctcagggcggacccgggtctctgcgttctcgcgagaagcgcggcgctgcggggccgtgggcgcctgagcccgcgcggccctcgagggccgaatatggggggatgcacggtgaagcctcagctgctgctcctggcgctcgtcctccacccctggaatccctgtctgggtgcggactcggagaagccctcgagcatccccacaggtgagcaccccgcggtccgccgctgtcccgcgaggctcggccggcgggggggcagttcattcatccaccagcccttccgcggggctggccaggtgagtagtgggggcctgtccctcctctccaggaccgccggggtcttccccagaattgcggtcgggcggcgctggtccctggggaagtgtaggggcacccgccctcgttgactccttggagttctcggtgaactcagcgtgcccga

SEQ ID NO: 10858 - DNA, 5715 bp, Homo sapiens
cgcccgcaccgcgcacacaggtagtggacgcccgcccacctgcccgtctgctgggcgcagggcgctcctggggtggggagggcgctcctgtggggggaaaaggggcgctcctgcctcggagggggaaaggacgcccctgtggaaggaagggggggctcttgaagcggtgtggtgagaggacgcttccgaggaaggaagggggtgctcctgcagcggtggggggagaggacgcccctgcggaaggaaggcggcgctcctgcgggggctggagagacgcccgcgcggtctcccggctcagggaccgctggctcgcgggtccgccctctccccggcgctatggaaaccgcactttctccgcctgccgtccccgatctctttctcctattacctcccaaacgcgatttcaacttcccgacaagctgacaagtgaatggcgcagaggacgccccgtaaagcgcccgcgagcgggtgggacacaggcgccccctccgcgcccctctgtcctccacggaagggcgcgcgccgctctcgatctggagcgcggtgctcgcgaacccgcggccgcgggccctggaacctccccgcgtttcgcggctgcggggggacggagatgcggccgggagacggggacgggaaacgggggacggggatggggcgcgcccaccccgagcgcgggagcggccgccctcgcccaaaatggggaccccgcgccccgagagcacggcccggctcgccgcccatgcttccactgcaaggccgcagcccccgccgccgatcccgatcccccgccccgcccagccgcggccccgcccggcgccccctccccggcggaagctcaagcccaattaattgagtccgaggcgggagggaagggccctgcgcgccgtggcccgccccgcccctcttccgcgccccttttcccgccctgggtggcatctcctccgccggcatccacaacaagccgctgattaatgaggccggggccgccccaccccgcccggccgggccggggccttcgcgggagggggaggggacggcgggaaacgcggcccggggagaaaggggggcggggcgggggcgcgcggcccgcccccgcgagcgccgcgccgattggccgagcgcgccgtccgtcggggggcgcggcgccaatgcgaggcagcggggcggggcggccgcgctgtgtgtgcctgcgtaacgccgagtcacatgttgttttgctcttcttagttcagtcactcggtgcgcgatgtgttactcactgtgcggcggggaccgcgacgagcccgggtcgccgttggcagcagcagcagcaacaccagcagcagcagcagccccggcggcggcgcggaccccgagcgcccgggcgcaccccggcttcccggagcgcgacgcggcggcagcagccccggtgcggccgcgcgcgccttaggctcggccccgcggctcggggaccccgactcccggcccagcgagcgcgtcccccggcgccgcccgagagcccgaggaggcagcggccgcaggcagccggggaggggggcggccaccgcccgcgccgggcatcctcaggagccccagagcgcggagggcgcggcgccgccgagcggtgctggcccccgcgggcctccccggaccttccccaccgcctgggcccgagggacgcgtgatcgggcgggcggccgggcgcaagggtgggagggagccgcccccgcccgcgccccctccgcccctcgccccaacccctgggcgccgggcccgggccgcgcggcctgaagcgcccgcgatggcgagcccgccgcggcacgggccgcccgggccggcgagcggagacggccccaacctcaacaacaacaacaacaacaacaaccacagcgtgcgcaagtgcggctacctgcgcaagcagaagcatggccacaagcgcttcttcgtgctgcgcggacccggcgcgggcggcgacgaggcgacggcgggcggggggtcggcgccgcaaccgccgcggctcgagtactacgagagcgagaaaaagtggcggagcaaggcaggcgcgccgaaacgggtgatcgctctcgactgctgcctgaacatcaacaagcgcgccgacgccaagcacaagtacctgatcgccctctacaccaaggacgagtacttcgccgtggccgccgagaacgagcaggagcaggagggctggtaccgcgcgctcaccgacctggtcagcgagggccgcgcggccgccggagacgcgccccccgccgccgcgcccgccgcgtcctgcagcgcctccctgcccggcgccctgggcggctctgccggcgccgccggggccgaggacagctacgggctggtggctcccgccacggccgcctaccgtgaggtgtggcaggtgaacctgaagcccaagggtctgggccagagcaagaacctgacgggggtgtaccgtctgtgcctgtctgcgcgcaccatcggcttcgtgaagctcaactgcgagcagccgtcggtgacgctgcagctcatgaacatccgccgctgcggccactcggacagcttcttcttcatcgaggtgggccgctcggccgtcacaggccccggcgagctgtggatgcaggcggacgactcggtggtggcgcagaacatccacgagaccatcctggaggccatgaaggcgctcaaggagctcttcgagttccggccgcgcagtaagagccaatcgtcggggtcgtcggccacgcaccccatcagcgtccccggcgcgcgccgccaccaccacctggtcaacctgccccccagccagacgggcctggtgcgccgctcgcgcaccgacagcctggccgccaccccgccggcggccaagtgcagctcgtgccgggtgcgcaccgccagcgagggcgacggcggcgcggcggcgggagcggcggccgcgggcgccaggccggtgtcggtggctgggagccccctgagccccgggccggtgcgcgcgcccctgagccgctcgcacaccctgagcggcggctgcggcggccgcgggagcaaggtggcgctgctgccggcagggggcgcgctgcaacacagccgctccatgtccatgcccgtggcgcactcgccgcccgccgccaccagccccggctccctgtcgtccagcagcggccacggctcgggctcctacccgccgccgcccggcccgcacccgcctctgccgcatccgctgcaccacggccccggccagcggccctccagcggcagcgcctccgcctcgggctcccccagcgaccccggcttcatgtccctggacgagtacggctccagcccaggcgacctgcgcgccttctgcagccaccgaagcaacacgcccgagtccatcgcggagacgcccccggcccgagacggcggcggcggcggtgagttctacgggtacatgaccatggacaggcccctgagccactgtggccgctcctaccgccgggtctcgggggacgcggcccaggacctggaccgagggctgcgcaagaggacctactccctgaccacgccagcccggcagcggccggtgccccagccctcctctgcctcgctggatgaatacaccctgatgcgggccaccttctcgggcagcgcgggccgcctctgcccgtcctgccccgcgtcctctcccaaggtggcctaccacccctacccagaggactacggagacatcgagatcggctcccacaggagctccagcagcaacctgggggcagacgacggctacatgcccatgacgcccggcgcggccctcgcgggcagtgggagcggcagctgcaggagcgacgactacatgcccatgagccccgccagcgtgtccgcccccaagcagatcttgcagcccagggccgccgccgccgccgccgccgccgtgccttctgcggggcctgcggggccagcacccacctctgcggcgggcaggacattcccggcgagcgggggcggctacaaggccagctcgcccgccgagagctcccccgaggacagtgggtacatgcgcatgtggtgcggttccaagctgtccatggagcatgcagatggcaagctgctgcccaacggggactacctcaacgtgtcccccagcgacgcggtcaccacgggcaccccgcccgacttcttctccgcagccctgcaccccggcggggagccgctcaggggcgttcccggctgctgctacagctccttgccccgctcctacaaggccccctacacctgtggcggggacagcgaccagtacgtgctcatgagctcccccgtggggcgcatcctggaggaggagcgtctggagcctcaggccacgccagggcccagccaggcggccagcgccttcggggccggccccacgcagccccctcaccctgtagtgccttcgcccgtgcggcctagcggcggccgcccggagggcttcttgggccagcgcggccgggcggtgaggcccacgcgcctgtccctggaggggctgcccagcctgcccagcatgcacgagtacccactgccaccggagcccaagagccccggcgagtacatcaacatcgactttggcgagcccggggcccgcctgtcgccgcccgcgcctcccctgctggcgtcggcggcctcgtcctcctcgctcttgtccgccagcagcccggcctcgtcgctgggctcaggcaccccgggcaccagcagcgacagccggcagcggtctccgctctccgactacatgaacctcgacttcagctcccccaagtctcctaagccgggcgccccgagcggccaccccgtgggctccttggacggcctcctgtcccccgaggcctcctccccgtatccgccgttgcccccgcgtccgtccgcgtccccgtcgtcgtctctgcagccgccgccaccgccgccggccccgggggagctgtaccgcctgccccccgcctcggccgttgccaccgcccagggcccgggcgccgcctcatcgttgtcctcggacaccggggacaatggtgactacaccgagatggcttttggtgtggccgccaccccgccgcaacctatcgcggcccccccgaagccagaagctgcccgcgtggccagcccgacgtcgggcgtgaagaggctgagcctcatggagcaggtgtcgggagtcgaggccttcctgcaggccagccagcccccggacccccaccgcggcgccaaggtcatccgcgcagacccgcaggggggccgccgccgccacagttccgagaccttctcctccaccacgacggtcacccccgtgtccccgtccttcgcccacaaccccaagcgccacaactcggcctccgtggaaaatgtctctctcaggaaaagcagcgagggcggcgtgggtgtcggccctggagggggcgacgagccgcccacctccccacgacagttgcagccggcgccccctttggcaccgcagggccggccgtggaccccgggtcagcccgggggcttggtcggttgtcctgggagcggtggatcgcccatgcgcagagagacctctgccggcttccagaatggtctcaactacatcgccatcgacgtgagggaggagcccgggctgccaccccagccgcagccgccgccgccgccgcttcctcagccgggagacaagagctcctggggccggacccgaagcctcgggggtctcatcagcgctgtgggcgtcggcagcaccggcggcgggtgcggggggccgggtcccgg

SEQ ID NO: 10859 - DNA, 858 bp, Homo sapiens; identical to SEQ ID NO: 10857

SEQ ID NO: 10860 - DNA, 247 bp, Homo sapiens
cgggcactgcctgtcgtcagcataacgaagaaacctacacccacgaagacttcagaccccacgtgattacatcactcaaccaccagcgctggcctggaggaacccgctgtcacgtgaccgctcgtgcccaatgaccgaggcccacgctttccagaccgccacagtcgctgtcacagggcctgagtttgggcggcgccccgccccggccgcacggtgcgccggcgttaatcctccccgaaggttccgg

SEQ ID NO: 10861 - DNA, 224 bp, Homo sapiens
cgccgccaagaaggaggaggagcggcaggaggcgctgcgccaggcggaggaggagcgcaaggccaagtacgccaagatggaggcggagcgcgaggccgtgcgccagggcatccgagacaaggtgcgcgccgggccggccccgcctgcgggaaggcggccctgagtccagcggggacccagatcccgcctgggtggaaggggctgcccggaagaggggcgggcgt

SEQ ID NO: 10862 - DNA, 1174 bp, Homo sapiens
cgatgtggcggggcctgggaaatgcgcccgctggagcacaccgcagcctcgcgggctcccgagcggcgcgcgcgggccgaggacctccagggcccctcgcgggtctcccgagcgccgccgcaccgcccctgcccgcgcccgggaccgcctcgtgggcttctttgttagggccgcctgcgccgagaggcagtctaggtcctgccggggacgcacgggccccactcctgacttcctagccggagtcccctgaggacttgtaagcatataggctggagtcgagaggctaaattaggccccaggggactttttcaataaaaccctaaatttcatttaggttgttcgtaggccaagcgattgcaaggactctgagccgaagcagcggtgccgggccgacccgaggctcgctccttatcgccccctccccgggccggctttgtgcagctggggtcctggaacccggtccctcccgggctgtcggccctggggtctggtgtccgccaccctccccccccggaggtcgccactgcccccctaccccactcccagcccttccgtttccctccacgtccccttcccgcgccctcccccacttgaattcttcctcccctccggctggaagaaaagtcggtaatgagaaaccagttcagtgtcagtcggaggaggggggcagataaccccagagatacacggcaatggagagagaactcattttgtgcaaagagggcctcgagtcaccagggaattcctggattgtctcaggctgtcgtgtgtgatgtccatcacgccgtgcgaacaccatctgctcggtattgtgctctcagttgccaggctacctgctgtacgcagtaacacttgactgcctggctccacgttcgcagcgctcgcccagacgcgcggggcgggggccgcggaggggcgggcgggagccctgattaagccatctgcgaggggagggggcgcgggcgcagcggcggccgggcacgaggccgggctgacaccaccatctgctggggcgcgggaagaacggcagctgctctgcgttgccccggcgagggacgcctggaaaaggctgaagccctgggcgtcctcaagcccgttatccacggggtccccgtcaccccagcctgctcgccgccggccgtcttttgtgattccctgctctttggttcgccgc

SEQ ID NO: 10863 - DNA, 8657 bp, Homo sapiens
cgagacgcgccgacctctccgggaagcgcgagcgcgcgcgtgtctgcgtctctgtgcggatctgggcctgccgtgcgcgtgtgtgcaaaggtgaaacggcggcggagtttcaaacatttcatcttcgaaccatctcctgttgaggaactaaggctgccaggtcgttgctgattttgaagagggtctctttcaactgcgatccctttaaggaactcggctctgtccatttccaaggaatgtcccttttcctcactctccagacgctgcaggctccccgcgctgcgctccctcccaggctggagccgcagctggcgggacgcgccgtttccacggtatgccgggtgagagccgcccacgagcggcccagcgtggcggacctcggtcttgagccgcgcggacgcctggccacgaggggctcccgacccgggcggggagaggtgcgacctggggggagggggcggggcgcgtaggaaggaggaggagagagaaaagggcgaagccagcgcgagattaggaaggagaggagggtagagacggagtcggcgagatgctggagaattcaggattgtgggcaccctgagcgggagagaaacttcaggaagcacgtcggaggcggggcatctgtgggaggaaggcaaattttgcagagcgctaaaggatgccgggagggacaagttagccatggggagacctcccagaaatccggagctgaaaacagggcagttaagtaagcaagagctggttagctgaatacgaggtccctagaatgtaaattataaataagaaagaaagaaacgaaagaaaaagaaaagagcgcgcgcagggtcccgggtccaggcgctcagagcagcccgtgcgggggccctcccggcccacagtagccgccgccccgcgtccctgaagtggcgcccgcgtggctactcggggatctcccaggcctcgggggcccatttgaaaacctcgagaggccttgcacatcctgccaggactggagctgcggggacctttcagtcttccacggatgctcctctgcacgtgttttccaggaaaacatttaggcctcggaagcgtctttgagagcctagaaatgccggttgagcgtgaaatccagtccaacctactcacagagtactagacctagaaacgacgtttgaaagagatgtgggttccatgttgacttaaattttgttccatttataacaacgcttttgttttcaaagaaaagaaaaatttcttagccaaacttctcatgtccccggccccctgttcctgcctcgctctctccctcgacaaacgcggggagccctggaacgggagggccggtgaccgcgaatacggtagcgatgtgatttgatgcactgaaactacttacatttccaatgttacttcattaaaggaaacccacataaaagcgtctgtttcatcttaattgccaaaaaagtttgccacacccccgaacggtaactgtttccccgccagacaccgaaagctcataaggaaccacaatgagaaaggatcaggagtcgcttaggttttattgaaatgcctcgatgccgttttttcttcttccccgaattaagccgccgggggaggaggtgggtcgcgcccaccgttgccgggactcgggccggcagacacgggccacagcgccccctcgccgcccgcgcgcacgactcctggcctgcgtcgcctccttccgtccccgcgacacggaggacggcgccgcgcccggcgagcgccccggccttctcagtcggccgcgtccccggggagaccccgagcccgagcctccggggccggctgttcctcgcgctcggcctcgcaggaaatccccgctcgctgaaacttgcgtgtccacgtagactcgttctaaattctttggctgttgcagggacaataaagaaaaatagaaacagtgttaattttttccccacctcctagggcacacctaggaaagggggcagggcccaccaggaacctgaaactgcccccatcgcctgggttattgtgaccaggggtcgcgtttgcaaagcagttactgggttttccctgcgtgcctgctcattccctccctcctgctcggacggcaactgaaaagcctcagaagccaagtgccgggctctccccagcgaccccacaggcctgagcaccccgcctcgcccttgagcaaaacatcccaggccctcctcttcgggagccgcggccttgcagccctcgtggccccgagacggagtctgggctgagcccgccaccctctcaggcagcctcgccgggaccgccgcgccaagactccacgctggcagcatgttttctcatgattgattttttttttttttaagaagaagaccaagccaactttaacttaagaagaaggaatgtgatttttttctttaatatcagagagctttaaagcaaaacgtagtttatatatttcaataacaatgacgagtgttaagtttttaatgtccctgcgtaggcattttaatttgctacagtcactaccaataaaaacggcatgtagtaagagtcgactgtttaatagtgcaaggtagacggtttttattagtaacaggcagcagcggtatggaacatatagatttcagtggaggagtataattgctaaggggaaaatacacacaggacgggaagaggccatcttcaaactcccaacactgagctaaagagggggaagggcaggcggcgtttctggagatgcaccctgggtgaggggaccctccccgccactgcacgtgtctggttatatatttaattgatgtcagaatcgactgtatccagagcagacactccagctccaaactgaggatgtttgtataataactggctgttttctcttctgcccctggcagaggtccggcggggggaggggggtgggtcaagggagggggagggaggatgagccccaaatgctaatgaaaccacagcgggaaccgctctttagaaatggaaatactccaggccagtgctccctggtgataaaaattacacccgatttttttttcatttaaactgatctgatcgtaaaggaaccctaaaggttgccatctgatctgacagtgtttgtgtttgccatccagcgtgtgggcctctcatttacccctcttcttggaggaattccctcccaggaagcgcaaaaatgtcgcagactgtcgacggcttgcccaacccggctgctttctctctctctctgtttttcagctctatagtaattgattaaaaatatctgtcctggactgaattaggatgtcccatgtggagtcgcaacaaggttgaaaccccccgctgggtcgttgcagggggcccagcctgtgggaacggggtgtctgtgggtggagggagaggtggtcgtgggtgtgtgtgcgtgtgcgtgtgttgagatggcctgaagaggatgtgtgcaggatgggggtgtggtttgtaggaagagtggtgggggagcagtgtgggcgaaggggtgggtgggataactggtagggggcgagtggctcggctcgggagctcctggcgggaggggtaacgtgcctggaccgcgcctaccgggagcctgccggctcaggaggagccatcctcaagcacagcactgcagtttgcaactggttcccttgcacctggggaaagacagcctgatgccgtgagtgtttctcttgcgccctggaccagactggcaacccgggctccgctccctccgcgccgctgcagccgcaccacagggaggccgcaacatgccctgcgtcctgagatcactaaggctgctccgcaggctgcagggccagcaggggtgcaggagtcggctgcaggcctgagctgaggcccgccccaggccactgcgctctctcttctccaccgcacccacccgagacggcttccgaggatagaggcacctgctgggtgggtgctcccaataggccagcacagacctgacactcttccatccccctgagcgccccccataggtgacccttcggagtgggcagccagacgccctcttcggccatccccgagtggaaaagggttggagaagcgtgatggggagagggttctaggaagctggggtcctaggaaccctcgccaaccgcctcgcttctgagccccgcaaggcaaccgcccccctactccagccgcgcgtcacctgagctacctgtaatgcccactgcaccggcggcgccaacctgagctcctgcccgttctcgacgtgactgggaggcttcaggtcctgccagaggcggtttgtcaggtaacaatcatccccccagtgttttgacaacacaaatctgaaagaggagtcaacttagaaaaacaaaataaaataaaactctttaggggacggcgtcttcttagctgaagccctggcgtcattcccaacagtggaaagtcgtaacgttcagggccccgggggttgcgctgcggatttgggggcagaaagctcacctcagggccctcctggcaattcgcaaccaaggcgccccggatccaggtccatgctgggcggagtggaccgcgaggggtaggcgaccagacgcgaggccacgcggggagcctcgggccaggaggcagagcaggtccgggaccgtggaagtgagagccgcgcgcactgcccggaggaagacccgagccgcgggcgccaccatcctgacctccccacttccctgcgacttccggattggacacaggggccgggcctcctcggggtgcacagcggggcaggctgtgagtcccctaattggacccggcctggcctgaccgcgggcggcctctgcctagtccgtgagggtggagaagggggtgggggcggggtagtggctggaaggggcgggggccgggcaggggcgaagacggtggccggggacggtgggagccggccggagccgggcaggggacgtggctccgagtggatgggagtgggaggggtgcgcgccggggcacgcagcgcggccgggctgggctgcaggtccgcgagccgcgggctggggccggagctgctagagaggcggctgcgccacaaaagcctgccggtccctcccgccgcccgcctccgtcgcctccgccctcccccgcctccctcccgtctctctgcccctcccccggccgcggcccggaggctgcagcgggcggagcaggggaggggcgggcccccgaatatgcagatgagcgcgtgatggacagctgcgcgttccaatgtccctcggaaactcgagcgctccttcctcaactcctcactcccgactccagactcccccaaaccccgaccgccggcctggcgcgcggctgcgcccaccggctccgcgctgctgccgccgccaccgccaccccgccgccgccccggcccgcgggccgcccaggctagtacccgggccggcctgcctccgccggccgtccgggtgcccgccgccgcgccgcgccccggccgggcgtggatggagggcgccgcgcgccctgcccgctgctcggcgtgacgcgggccccgcgccccgcgcccaccatgtcctacccgcagggctacctgtaccaggcgcccggctcgctggcgctctactcgtgcccggcctacggcgcgtcggctttggcggctccgcgcagcgaggagctggcgcgctcggcgtcgggctcggcgttcagcccctacccgggctcggcggccttcacggcgcaggcggccaccggcttcgggagcccgctgcagtactcggccgacgccgccgccgccgccgccggcttcccgtcctacatggtaaccgggcgcgggcgggacgcgggactcctgggcgccgggacccagacggggctcaggcggagcggggctcgggttcggcgggcgggggccgccgggaatgtggcgcggctggcgactcaggagtcgccggctcggttggccgccccgcaggctgagccgggccccgggtggggagggcagcgcggcaggcggggacgtccctgagcccggccgggacccgcgcgccccccgcgcgtcccctcggctcgccggctgattttctctgagagcctgggaagtgcgtctccgccggggccggggtctggcgccgtttgtccctggtttccgcaccgcagcctggggaggcgttcggagcgggctgtgtgctcgcctgcattggcgtggggcgcgagggtccgcgtcactgcggcctctgagccgacggccgggcggttcgcattcactcgcggggctcagggcggtgggggtcaccgagttaggcccaggagccgagcattcagctgcggctccggagtccggcccgaggcgcccaggtttcggccttactctgtccagcggaccatgctttcaaatatcgtgcttgcgggcgcgtgacccgctaagggccgcctgagtcctccgtggcccgagcgcagctcctgctccggcgacctgggggcggctcgcgagtctcgaggttactgagctgggccaggcccgggccgcggcgaagcacgttacgggcgattgaggccattacggggttgtcgcgactgccggccctcggcggaatttctgggcagcgaccgagtcgctggggccttggcgaaggctgcaaatgcctcgaatttaaacgttaaaggatgaattaaaatgctaattacggcgtatttgaagaattcgaaacggtgactggcttctgagttgcaaattggatttgcccagctttagagcagtgaatagtgaattgggggctctggggtgtttttttaaccatataagggaggggaagagggagtagggggaggcagccgcactccaagcatctgcagaaatttagatatcaaagagctacctgtgggcctgtgtgcgcgcacgtgcaagggtttgtgtacattgccacgagcggctccggaacacttaggggaagatgggtcattttaggaaagtgaaatagttcagaaattcgagaataaaactccggtactttttgtgatcaacagctggtcccgaatcacactgcgtttttcctgctcttttgcggcgggaagcgcagccccagagccagactcacggggggaacggtggccgtgggcgggcggaggggtggcatcctctggctggttgcccgcggggtctccgcatactccactcacaggctcttgttggttccagggcgcaccctacgacgcgcacaccaccggcatgaccggcgccatcagctaccacccgtacggcagcgcggcctacccgtaccagctcaacgaccccgcgtaccgcaagaacgccacgcgggacgccacggccactctcaaggcctggctcaacgagcaccgcaagaacccctaccccaccaagggcgagaagatcatgctagccatcatcaccaagatgaccctcacccaggtctccacctggttcgccaacgcgcgccggcgcctcaagaaggagaacaagatgacctgggccccgagaaacaaaagcgaagatgaggacgaggacgagggcgacgctaccagaagcaaggacgagagtcccgacaaggcgcaggagggcacggagacctcggcagaggacgaaggtgagcgggcagcggccggcgcaaggtctcggggcgctttcttcccaggcggggcgcagagctaaggcggggaggacgttgcccgccggacaccccaggtccgggccggagccccagccgcaccacattgccctggggtcgccgggatttgagcgagcgattcctcgggcccttcccggggaggtcaggctccgcctgtcacgtggccgggtgggggcgaggtgaggggtcccgtggggagggcccagtgccgcaggacagggggcggagggggctccaggtgcctgcgctgtcccctcgtgccacccaccgtgcccgcgcccccacagggatcagcctgcacgtggactcgctcacggatcactcgtgctcggccgagtcggacggggagaagcttccgtgccgcgccggggaccccctgtgcgaatcgggctcggagtgcaaggacaagtatgacgacctggaggacgacgaggacgacgacgaggagggcgagcggggcctggcgccgcccaagcccgtgacctcgtcgccgcttaccggcttggaggcgccgctgctgagccccccgcccgaggccgcgccccgcggtggccgcaagacgccccagggcagccggacgtctccgggcgcgccgccccccgccagcaagcccaagctgtggtcgctggccgagatcgccacgtcggacctcaagcagccgagcctgggcccgggctgcgggccaccggggctgcccgcggccgccgcgccggcctcaaccggggcaccgccaggaggctcgccctaccctgcctcgccgctgctgggccgccccctctactacacgtcgcccttctacggcaactacacaaactacgggaacttgaacgcggcgctgcagggccagggtctcctgcggtacaactctgcggccgcggcccccggcgaggccctgcacaccgcgccaaaggcggccagcgacgcgggcaaggcgggcgcgcacccgctcgagtcccactaccggtccccgggcggcggctacgagcccaagaaaggtaggcggcccgcggccggcggcgcccgggaggggagggagagccagccccggggaggcggagcgcccgggagacccgagggagggtccgg

SEQ ID NO: 10864 - DNA, 1059 bp, Homo sapiens
cggaccgtccttctccatcccaccccccgggtctccattgccgcggccctgccccaccactttcagctgaggggtagttcggagctccatggtcccttccctagagcggccgccccctcgggcctccccagagccttcgaagagccgcgtgaggaaacggggacctgcccggggcagcagatctccagcggtgaagacgtagagcaccgggttgacgctagaactgaagaaggccaaggccgtagttcccgctcgcgccgcctggccggctccgcccagcttcgccaaggccccttccggtggagccagcgctgcgaccgcctgcagaaggttgactgcgtggtagggggcccagagcaagccgaaggcaagcacgatggcgctcaccagccggcccacccgcgccccgtgccgcccggagccccagcgggcgccccgcagccgtgccagcgtcacgctgtagcagccgagcatcagcccgaaaggaagcacgaaagcggtcagagtctccaggctcaggtgggcggcggcgtggaccggcgacgggtggcacagctggcatacgcggtccctccacaggtggcggtagacggcggccgggacggcgagcaacagggcggccagccagaccgccagcagcaggcggcgggccagggccgggctgcgcagccgaggcgccaggaaggggcgggtgactgcgaggcagcgctgcaggctgagcaggccggtgagcagcacgctggcgtacatgctgagcgcgcacacgtagtacaccgccttgcagcccgcctggcccagcggccaggcctgccgggtcaggaaggccacaaagagcggcgtgagcagcagcaccgcgccgtcggccagcgccaggtgcagcacaagcgtggccgccagcggtcgcccccgtgcaggccgccagcccgccaagctccacaccacgaagccgttgccaggcagccccagcagcgccgccagcagcaggaaggctgtgcctgtggcccgcgaagtcttccagctcagcagtgtctcgttccctgggggacggtagcagaccga

SEQ ID NO: 10865 - DNA, 1663 bp, Homo sapiens
cgcaacggggcgggggcagacgtcttcagctttagaactccgtcgggttcatcgctcagtgtggacgatcggcgcccccacgagacccatcgagggcacatagtttccactccagctcgcttcatccgacccagacgatcgccagcgcggccagcggccagcgcacagcgagctgcctgggcaactgtggccggatcctagggagcaagctggcttcgggccctacctagctccacccggctcctaccggccctcccacctaggagctggaggatggtcccggggcgccccagggggactgctggtccccggagtctccagccagacgcgccttgttgtgtgagccgcgtgcgcgcccaatttggaggcagccgcccccgccgctgacaggtgctgcccagagggcgccgggtgcggtccctggcgcagctggacgcgcacgccccggtgcgtgcagcttcccgagctcggtcagagagaagagggagccagggcgcggcctgggggacgccagtggactggagccgcggagcttcgagggaaaaactttgcaggcgccgcggccgggattcggttacggctccagcccaccccagcaggtgcgggaggaagaggcagcgccggagtcccgaggccagagagcctcggcggcggcggccgcttctttcccccgagctggcctgaagtcgctgggcactcccggtttctgctgctgcgcccgccgccgccgccgccgccaccgccagcgccgcggggacccgggaggaggtgcagccgaagagggaggagaagcaggaggaggaggaggaggaggaggggagaggaggagcagggggtggaggatggagccccgggctgccgcggcgggcgagccagagccgccggcggcgtcctcctccttccaggcccggctctggaagaacctgcagctgggggtgggcaggagcaagggcggcgggggcgggcgcgctgggggtccagagcgccgcactgcggacaccccgtcgccctccccgccacccccggtgggcacagggaatgcaccggccagggggagtggtgcaggcagcaggtggagcggcttcaagaagcggaagcaagtgctggaccgagtcttctcctcctcgcagcccaacctgtgctgctcgtcgccggagcccctggagcccggcggcgccggcagagccgagcaggggtccacgctacgccgccggatccgcgagcatttgctccccgccgtaaaggggcccgcggcggcctcgggagcagcgggagggacgcctcctggcggacgctcccccgactcagctccttcctcttcctccgcctcatcctccctgtcctcctcgccccagcctcccccgaggggggaccgcgcccgagatgagggtgcacggcgtcagggccccggggcgcacttgtgccaccagaagagctcctctctgccgggcaccgcctgcctggagcagctgctggagccgccgcctcctcccgcagagccggcgcggagtcccgcggagtctcgggccccggagacgggcgaggagcacggcagcagccaggtgagtgccggtggcgcggccggagacaaggtgcgcgggaccacgcctccctcttcaggcgttcaccacccggggagcggggggcgggggccgggaggcgg

SEQ ID NO: 10866 - DNA, 2065 bp, Homo sapiens
cggagtaggtcgacgagagatttctgagaaggctggcagaccaccgcggatctttgtctttttacgtggagccatgggcgaggcgctcaagaacttgctgaaggagctcgacttcttcaagcctcgggccaggtcctggagcatgaggtcgtcagccaggacgcccagaaatgcactggtggtggaactgaggatggtggcggccacctgtacggggcgcctggcagcaagactgccacttccaccaccggtcgcatctggctccgtggtgcctcgcaggcctggatcgccaagaaggcggcgcagcgcgtacgaggagccgggccgcaggtactggtaggcgcgacgcccgctgtgatcacgcacgtgcacctgggcacccagacgcaccaccagcagcacggcagcgtcctcgtggccgtgcagtgcagccaggtgcagcggcgtgtagccgccgtgggagcgtgcgttcacgtcgactggtgcgccactgcgccgcgcgacctccaccagctgcagcgccatctcgccgtcgccgctcttggcggcccaatgcagggccgtgaagccagacatgaagtcgcgcttggccgccaagccgcggtcgcgcagcagcagcccgtgcagctggtgggtccagcggcccccggcagtccgcacgagccactcgtgctcggacggctccaggggcaccgcggacggcggcggcgcggcgggcaactcctcggcgtcagggctcagcagacgcgggccggcgcgcgacaggcgcctcaggtgcggggagcggcccgggcccaggccgaggcccagaccggactcttccaccgagagccgcctcagcagcagaggggagctccgcgggctcggctcctccgacagctgccggcgcaggccgggctcctccgcccggaggcggagcgtggcgggggccgggacgcagcgcaccggcagcatacagggcttctgctgcggcggccctttcgctgccccgggcccgggctccgcgtctggcggatcagagcagggcgatgccgcctcagaaggggccctaggcggtggggccgcgtctgcggagggtctctcggtggcctgggctagctcaagggctggaagcggtgggtcggcggaccgctccccgggcggctgagcgggctcggaggccggcccccccggggtgtcctgtggctctgttggcagacccaggtcccctggcggctccactggccgcggcacccggaccaagggcggagctcccggggcagaggcgctccgcggcaagaccgtcgaagtgggtttcgacggctgggccgctgcccccggggggccgaagggtgcgggctcgggctccgggggccggggcttcttcctcagcaccacgaacttgacgccgtcgagctccttcaccaccgccacgttgttgacgaactgcttgaagcggtccctgcgggcggcgcggccccgcgggtcgccggcatcgagcagcggcttgaagcggctcagcagctcggagttgcgcaccttcccgccgtgctcctgcaggaagcccagcaccgccgcctggctcaccccggcagccgcagcggcggcggcggcggccagcgccatggtggggccctgggttcctggctcccggggcgggtgggcgccgcgtcgccgcgggacgcgcgggagcggggttccgggaggcgcggccgcgctcacctggtgccttccccgcggccagccgggcgtgtccccgaagctggacctcggtcgcgccagtgccgctgggccggggcgtctcggggcgaagggcgccgggggccgcggggagcgcccacccccagcgccccgccgggccccggccttcggggtaggtttctgcctttgtattctgtccaatgggcgcctgcttccatcccccgcgccgcgctcgccttacaggtgacagctgcccccgcgatgcagagggaaccggagcagaaattcccgccgccccccgcccgccccagaattaaaggcgcagcgctccagctctggtctcggttgctaggtgggtgtgttccctagggacgccgcggtccgc

SEQ ID NO: 10867 - DNA, 3487 bp, Homo sapiens
cgcgcgcctccagcccgcccctggaggcagtccgcgggaccgcaggctggaggcgcgccggcgtgattccgaccgccggagccgggaggaggagccggaggaggctgcggggggctccggcccaggcgaaggaagggcaagaggctgttcgaccgggggcggcgccgggaggtgggtgggcttaacacccaggtcgggggaggggtttaagagacaccgggaagggcagccgagccccaggggcgggtggggtggtagctgtgtgtagtaggggacagggctgggcctctggaagctagagtgaagccttcctggctgtctcgcaggcaaccccatcctctggcagaacagctgcgaatcgccaagttgacccctctcgtcccttggccgagaggagaggatgtctcaggacccagggatgggcgggaagaaaccatggggagccacaagtctgcacccaggcggggaggaggcgggcgggcgccgctccgcaggcgcaggcgagtgggtgggaagaagggagggagagggaggaaggaggtgaggccgggaagatgccactgccgggggcggggcggggccggggatccggcaaagggactgcagcagcgctaggtgggggcgggggctgcaatgtcactcatttgagagtcaggtgtgtgcgtcccaaacggggtccgccacaagccggcatcttcctggtaccacccatggtgcagggccctaggcagagggctggggactgcggatccgtccctgaagcgggacgcgaaccggcagagttgggagaaggtaaacaagggccacgccccctgccgtcgccccgcgggcgcgcacccgccgctccggccgccgccggtacatttccactctcccagcgcctctccccagctggactaccgcgcggccccggaggtggaggctgcccccgaccccagtcctcacccctggcgccgaggctccgcaccctccacactcacctggaaagggtgtcccccgcccctccaaaaaaactgtctaatttgtgcagagcctccaaccccaggagccgagcatgctgcccccgcgtgcagcgcccgcgtgcaccgggccgggagagggggcgacagggcggaggcggtggcccccggaaggtgtctgggaccggaccggctgcacgtgagcccagcgcgaggtcatgtgcaccggctcagcccggttcggcgcccggacgtgctgcgtatcaacaaaatgaaactcggggagacaggagggcagatagctccaggttctcggagcccccgcccgggccgctcgacctccccaccgtacccatctcccgccgcagcccctacgcccggccggagcccgcggggaagttgcagccctggcgcgcccccgcccgcccgcgccccctcgccggcccgggggcgctttgccgcagtcattaataaagaaggtcgccaagctcacccttccaaaagttgttgttgcatgcgcccctctcagcctccccgcactgtactctttaaaacacgactgaccaacatgcgcaatctctctcccctgtgctgtgcatcccccccctctccgcgctggcttcctagaacaggcagccagcaggagagagagggagcgagcgagcaagagagagcgagggagcgaagagcgctggcagatctgttgcaaaaacgccaaataacgtcgtggagatgcgcagggcccatccgccgggggctggatcttaccttgctccgcggtgcccccctgacgggcgctgccctcggctacgcgccgctgcagggaccggcgcgggaaggatgctcccgaagccgggagctcctggggccggcgcgggagggcggggggcgcgcatccatccggggtcgcggcgagggaggcggccgggcccgcggcgtcccaggccccacgccccccgccggggacggtcggcccgcaggacctaagccggtgccgctaggagtgggcgcaaagtaactccatggacgctactcaccccccccaaaaaatagcctccaactgcgatggccgcggtcggcaccattcaccaaccccctgtgtatgtttctgtttctttttaaaccaagacttccttgtgatctctttagaaaaaaaaaatgtgttggggtgggggtggggtgggggcgggcaggaggagcgagggagggggagtagccacttttttcttattcactcggatctccgctcccgacacccccgtcgccgcccccccaaccccccgcccagttgtttggctccggcggggagtccaggtagcgttgcgggccccgtgggggaagggtgccctccctcgcagccccaccaccacgcctgctggcaccctgggcccggactccccatggactctggggcgcccctagcccgccctgtccccagggccgggcccgagcggcggctgcgcccgtgcaagtcccatcaggtctgctcacacttcacacactcacacacataccccgcccctccactctttcactcacactttctgctcacaccccgccccctacgcgccccagacccgggcggcgccccccgcaaccttaaaaaaaaaaaaaagcgagcttatacttaaaaaaatcttttggcgccatattaatgacgtacttaaaatttgccatttctccctgcgtcaaaaagacgtttctttgcaaataacagcctggaggcgacactcgcggagggaacgaggtttgcactgagcaccccgccccccggggctccagcgctggaagaccctcgccctaggccctgcttctgaatcgctggttttaaaatgcgaatcgaataaattgcgtggcgttttgcagcaccagaagtgagcagaaagtgctggcaggaggggagtggaggggcgaacgcgagtcttggggagggggcgcggccctcctccccgcacccactccaaatggaaaactaacattccgggcgggggaacttgaaattgtaggcgacctcaagaaaagaggggcggtccgtagagagggtccccattgggctcgtcgccccctcccccctcccgggtgcctcctggcgcctagcgctgccccgcatttccggggggtggagaaggcagtgatgagcgggtgggtgggtggttgcacatcctggccccagcaggattttgccccggggcgaccccttcctccttgctcttccttcccattaccccgaaaggttaaaaaccgaggggtaacttccaaaggctggcacatggcgaggaagcggggcgcccctctccccacccttcgcctcctcgcccctcctcctccggctccacttcccgacttgaccttgtggtgcacaaacagtacgctcggatcctcgcagtttctggaagaagagcctgcgctcgccaggcgggcgggctgtcgggctgctagccggcggtggcggggccttgggtctgttcccggagccgcgggccacacccacccaacccgctgcgcccgccgagctcaccttctctcga

SEQ ID NO: 10868 - DNA, 847 bp, Homo sapiens
cggtcgctccagcaaagttcccaacttagtcgacatgacgcgcggcgcagccaatgggaggcggagttggcgtttcttggtcgggggggggccggaggggtgggccccgcgtctccggtgtctgccgtgctcactgaatggagagagcgagcgccggccagctcacccggccgccccgtgccccagccgcagccgccgcgctccccagcccagccccaagccggacctccccgggcgccacgccccattgcgctcgccccaggtccccaacccggcccgcgggccagcggggccagggggcgctccgcacctgggcactcccagcgatgcgcagcggggcagcgccggccccgccgatggagctgctgttgctgccgccgccgccgcccggagcgccccgctccgcccgcgccccgtgcgcctgagcaccgagctcgcccctcctccgcgctaactccgccgcccgctccccaggccgcccgcgctccccgcgcgcctcctcgggctccacgcgtcttgccccgcagaggcagcctcctccaggagcggggccctgcacaccatggcccccgggtgggcaggggtcggcgccgccgtgcgcgcccgcctggcgctggccttggcgctggcgagcgtcctgagtgggcctccagccgtcgcctgccccaccaagtgtacctgctccgctgccagcgtggactgccacgggctgggcctccgcgcggttcctcggggcatcccccgcaacgctgagcgcctgtgagtacccctgccccaccccacgcgggccacccacctgggtcccaccgagggggccccaggcgccagatccgtcctttcccctcgg

SEQ ID NO: 10869 - DNA, 909 bp, Homo sapiens
cgggacgggggcgagaccctgggccctcaggggcactgaggggtcgtccatgccgggggacatggccacttgggggcggccctcgtcaaccgcggagtggggaaaaggggggagggatggaggacgaacgcccggcggtgtctaaaggcacgacgcggagcaggaaccacagccctggtccccagaaagcgcgcgcggcccggggcagaacctgccgaagttccagctcggggcgcaagggatgtgggggtcactggaagacggggcgcgggccgcccgtggggaggagactggacccgaacccggcccaccccacccgagcggcgacgccagcgctgaccccaggcgtgtcccggcccccggcgcggctccggcccaaccgtgcacgcccgcggaaggcctcgcacccgcgtcagaagtggcctgcccggggccaccggcccgcaagtccccggtgttctcgaggtccctgccccgtcccgcgcggctgtagccggcgggaggggctgagaggcgggtcgcgctgggacctaaggcgccgccccctcgccagcctctccctccctccgtcaccgggtggccggagacccgggggcactgctggggtaccccaaagcatagggccagcctgagtgcgcaaggtcctgaaaagacgggggggcggcgacaaggagtagggaggggggctggaggaagacggcaaagtgaccccggaagggtccaggcgccccaagcccatcgaagacgggaggctctcagtggcgcctggggggactgtgggaaaagcagctcaagaaggggaatctggagcgaggtgggggagaggtcggcatggccttctctaggagcgccagcgccagacagagcggtgacaggccgcaccgggagtaccccgtctatactgaacgg

SEQ ID NO: 10870 - DNA, 2150 bp, Homo sapiens
cgtctttcgtggccgggaaggccaggccgagcggggcggtcagccgggccgggaggagggggctctccgggccgcgcggccgcacaaagcggggagatctgctgctgcggcggcatgaggcgcgccccctcccgcgagccagcggagcgcgcgcgcccgcccccgtcccccgccccccgccccagcccccggagcgccattcgcggagcggcttacgctagtcgccgggcgtaccgcgccccagcggccggggaggtgcgctgcccggctcccgtaaagttattgtgaatggggagcgggtgacgtcagcgccgaatgtcaacaatgtagcgattgagagtgtgggcgttccggggagagcgcaagccgcgcggcgcggagcaaacagcgccgagccgccgccgcctcagcagcagcagcagcagcagcagcggcagcagcggccgtgcacgcccgggctgcggtcgcacagcgctaacgtgagcggccgccgccctcgccaccccgcctgcccactcccgccgccgccccgctctcgctttccccccggcctcccctcgccccttcccctcccccttcccggcgcactcggggggctgggaacgagctgccatgtgatgcgcgtcccctccgcgagctttcggtgacccacgaactgcccacctcgccggctgccgggagggggctgcgagccgggaagacgcggggaagaggaggcggaaaaggacgcaaagttctccggcgaggtgagtcccgggccccgggccccgggccccgccgctgggcggggtggcggggcaagtttgcggggggagcgggcgcgcggggcgggcggggaggcgtggggaaacggcgcgggaagggagccccggccgccgggcgcgcagccgccctccccgcgccctgcccgcttttatggcattttctaggaacgggaagggggtgggagccgagccggcggccgcgccgcgccgaatgtgtgctctccctcccggctgtttacggcggccgaggcgcattgtattttgctggcgtcgaagggtgttttggaacagcagagggaggaggagcagagagtaataagtcaggcatggggagggcgggctgcaggaggcgcgcgtccgcgcgagccgcagcagctgtcagacccgcggccctgcccccggcccggcgaggcccgggtgtcccggcccccagcctgcgatcccagctccaggccgggcggcctcctccttaaccctcggcgtgcgcatcccgggctgctccgcgaggaccttggccgcggcgcctttgcgctcagctgtcagccgccgccgggtggcccggaccaccgcgaccggcggggaatcaaagcccaagtttagggtcgcaggaagaggcgagctgggggcctcgcggcgcagacctggatcgaatctctcctagcgaaagatcgggttgtcggaaagcgtcccgcgtagctaagacctaagggcgccaggcttctgagagggaaaccttgcacctcctctcccacagatcctccatgaagtcaaggtgcaacacacacacacacacacacacacacacaccctacactccagtctccaagccccagaagcttcacccaggagactggtttatgaaggggacactgccctccccgtccccgcgtcgaggcgctccgtggccccgctgtgcttcgctcacccggcgggtgttcgggagcccggcgccgctggagacggcggcgggcggcgctcacgggctaccctaggtgcccacgaggggagagactggagcgagcatctcggcgacctcggtctggccaagcatttgcaggaactcggaccgtgaggggaagcgtgcagggccgggagtgagtgtgtgaaggggtggcacactcctggcttctggggtcgcgggcgcatggggcatccccagcactctcccgcgcgtaggcgagtttggtaacttgagggaagttccggcgcggccgctgccggggtggtttgtctgtggcccgatgaggcgcgcctcgcagcctgctctcccggtcaccgccgtcgccgtgacctgtggcctccaggaaacgagagggaccggggcgccccacccgcgagacggacccgcagtctcccggcgggcccgcgggcggcgagacgcggcgt

SEQ ID NO: 10871 - DNA, 506 bp, Homo sapiens
cgcctcacgacgtccatgctagggcctcccagaccagcggagaaaccagcagccctggaccgcaagcggcggggtcagggaggcgacaacgggaagcccctgccggaccctggacactcaggacctagtgctgcccgggcgccctcccgcagcagccccagggcgaggaggatggggggggtcctcgcaggggccacactgtcggagccccacggatccgggcgggacggtgaggcctccacactgagccggtggcaaagtccccgcgaggatgaaggaggaaccccgtgctcctcaccccaccaggccccgcatttcctggctcctcctgtctcaggaaccgcctgtcccttgccgcgaccggcgagtccttccgggtcttcctgaaacagtttcgtcccgaggctctggatctggaagcccaggggcatcgtccgggagcggggcacccactgtgggtctccgccagccagcactcaggcccggagctcggggacagcgggcgc

SEQ ID NO: 10872 - DNA, 1503 bp, Homo sapiens
cgcgctcctgggtacccagaaataggctttccccgggaatccgcctccgaccgggcgtctctacaacacctgaagcttctcaggacgccctctgagctgggcaaggcgagaggactttctcccagagcccagccccgagcaatgcccgagctcgcgaggtggggctgggggcgacaaggaggcggagcggggacttagccaccggggactcctctccaagtcagttcccaaaccattcggcgtcatgcatccacagcccgcgcgcagcccgtgcgccctggaccctacccaagcactaggctcgaccagggccggtccgaaggtcaccgtctacggccagggcagaggggcggcgggaaaagggcccagtggaccctcggtccaggagggccggtcagctgttgggccgcgggcacccaaagttgcgggggtccgggtctccgaccccacgcccagcggggctctagtacccgagggcgcgcgctgcgactcgcagagcagcgggtgcagcaggctggcggggctgggaccgcgagttttgtttgcaaagttcaggcggggcagacgccagggagggggccgcgtccacgcgggcagccccggcgctgacaggtagcgacgcactccctcgtaatccgtccaccagcagcctaaagtgtgcactgggttcccagtgaaatgcctggccttgaaagtttagccaacatcgggtccagcggagtcaccagggccgccccctgccccgcagaaccaggttctggcctcggccacggtgggggtcccgtatcagcccgacaaccccgaggtcacgcgcccgaaggactctctgggacaagaagtggagtggggcggccaggacgcgggccgtggggatcgcgagggaggagggggcggccgcccggacttaccccgtggggtccccgcgcgcgggcgccccggcgtgtcggatcatgccgccggcagctccgggacggggaacggaggcgctcaggcgccgggccgcgcggaacgcggagtcccgggcgcccgcatgtccctggctctggccctctggaagggccaggccgccgctgccgccgcgctctggggctctcgctcccttctacttcctgtatcggagcgagcggggctttcaggaagaggctggccttggtggtcaagggtttttttgtcaaaagccattcggcagcggctcgcggcccggagccccctggggcacacggaggcccgggcggccgcgcccccggggccgggcctcggggcggggggtgctggggccaaggcgccgcacgggcgcccaacctcggggtgccgcctccacaggctgtggctggggctggggcgcgggaggcccgcggggcttcggagagggaaacttagagaaaagtcttccacttggcttggggccgcaggggaaggaagacgccctccgcctgtgccggcgccgaccgcgggccggcaggtggggaggcccagagctggcggggagttcgtcccactcgg

SEQ ID NO: 10873 - DNA, 907 bp, Homo sapiens
cggcccacgtgcctttcatcctggcccgcagaggcctgagtgctgtttcgggcagctccgggcagggctgggtagggcccagcggaccccacgggccgcccccccccgcctctccccagctatttgtctgtcgtccctcttcgtccctcttctcctgaggtgctgtcccggccctcggggcgggggcagccgcgggcagctcagtccgcagcgcttccagaggtgcccgagtctcctgaacgctccgcaggaaagcagctgtgctgcgtggagccctcccctcgtcccggtccctccgtccgtgttcctgtccctcccgttctgcggcgggaggtggcggtgtgggtctccggggaggcgcggcgggctggggaggtggggaagggtgtgcgcgtgctgggggtgggggggaaagacctgccgccccccccccccgcctccccagcccttggttgctatgcagtttctatggcagcggcatcctcagactcaactttcaccctcgtttagagccaattaaggtaaaatagtgaggggaggagggaagagcgtggccagggaagggaggggggagaggcaggaaattcaattcgaagctgcaagtgcagcgtttactctgccaaagtcgcagtacagattccgaagccgcagcgccgtcccctcctttcctcgccccagcccgagcgggaagcggcagcagctccccagagccctggcttggcagggaggggacggcgcccgagcagccatattgcagccccccgggtccctcctccggccggcgcaggccccgcgctcacgacctcctctgggagccggatctgtcctctccatcgccgccacccgccggcctctgcgtcccttggcttccgacatcccgtctggccgtccccctgtgccggtccga

SEQ ID NO: 10874 - DNA, 1925 bp, Homo sapiens
cgggttctccgccgctttggggctgagcctggtgtcgctgttcacattgaacaggacgtcctcctccgtgagcggcggaaccgccacccggtaaagcgggtgctcgaacagcctggccaggagggaggcgtctccgccggggccggggggcgactcggaccgacgcgggccggggtctcgcagcagcggccggtgcgcggggtcgtggggtcttagggcgccgggatcccgcccccgcaaggcgcgctcggccggctcggccgcgggcggcagtttctccagcgagtgggacgagaggttggaggaggggtcggagctgaagtcctgcaggatgcggagcgtgtgcttgttgggccagcccgcgtcgccggcggcggaggaggcggccgggggctccccggggcggccccgaacctgggcccagccgggcgcggccacctcggcggcgggctgcgcgcacgaacagccgggctcccccgagggccgcgcgccgcgtcgctccagcctgggcagcaggtccagggcgatgtgcagcgcgcaggccaccaggaacaccatcaggatgagcacgcggaaccggcgcaccagcatcatcttcatggccgcgcgggccggcccgggcctggagcgcgttctgcccgcgcgcccctctagctgcagctgggcacgagcgcggcgccgcctcgcgggtcaaggtccatcggtgccgggcggctaccagctccggggctgtccccgggcccgggccgcgtgcagggcgcccgccgccggagcgctgggtccccgcgccatctcgggcccgtccccgctcggcctctccggagcggccgcgccctcagccggggagcccaggggtcctggtccgcggagccgggcgcgcggggggcggctggggccgcagcagggggaggctcggcgctcgcagccgccggcgcggggctcatcgggcgtgtgggtccatcccggccggggcgcgacgggcctgggcggtggcggcggccgcaggcgtcccgatcctcagcgcgctcctctccaggcgccgggcgggcgggcggggaaggggcggctcctccgggccgggctctgctctcacgccgcgcccgggagaccggggctggggggaaggggggggcgaagggcggaaggggtgggcgcggggagcggccggcggggtcccgggcaggtgcagcggccgccccgagcgcagctcccgcctggccgagcctctcggcgccccgcgtcccgggcgggcagatatcgagcgccgcggagccgccccccgcgtcagcgcccacagattggcggagccgccgccccacgagtcacggctgggcccgggccggctgcgctcccgctctccttcctcctcccctcggccgcgccccgcgacgcctctgagctccgggcccgctaaggagagggctcctcctgcccgcggtttgcagagggaagcggcggagaccgggagggcgcgctcggttctggccaggccagcagctgcggccgagtggggggctccggcctggccgcttcctgggaccccctcccgcccggggccgccgccgccagctgcagcctctcggctcctccccagaggagcgcggggccggggcccaggccaagtccctccccggagccgcggggcgtctgcgccgccggatgagctccccgccgggcggcgaccccgtgccccacgcccgtctcggcaaggaggaggcggaggcggccccgcgagagaggcccaaggagcgactgggcctggacccaggggacgccagggcagcggagctcccggcaccggtcccgtccccccccccccgcccacccgcgggacgcgcccgccttaaccctccaggcgccgggcccgctgggggcgctgagaggggctggtgtgccgggggcgccttcctgcttggggccgacgg

SEQ ID NO: 10875 - DNA, 1287 bp, Homo sapiens
cgcgtggcccgggaggctcccggaggagggaagggcctatctcagcgaggggtataggcggagaaggtgcggggcgaggcggccgcgggtccctggcatccctctccttacgcccaggctaagctggcggtgctgctggtgacgctggtggtggccgcggtctcctacctgcggatggagcagaagctgcggcggggcgtggccccgcgccagccccgcatcccgcggccccagcacaaggtgcgcggtgacggctacttggaggaggacaactcggacgagagcgacgcggagggcgagcatggggacggcgcggaggaggaggcgccgcccccggggcccaggcctggccccgagcccgctggactcggccgccggccctgcccgtacgaacaggcgcaggggggcgacgggccggaggagcagtgaggggccgcctggtccccggactcagcctcgctcctcgccggcctcagtttaccacgtcttaggtcggggggaccccctccgagtctcgcgctgtcttcgaaggcccctgtctcccttcccccacgttggggacgcccctcccagagcccgggtcacctccgggcttccgcagccccctccaaggcggagtggagccttgggaactccccggccaagcacaggggttcgaaaatacagctgataccccgcgggcccttagcacgcgccccagcgccggagcagggtcagggtcttcttgcgacccggccccgctccagatccccccagctctcggccgcggacccgggccgcgtgtgagcgccctttgcacctcctatctccagggtccgccgagagccacgattttttacagaaaatgagcgataaagagattttgtactgtcctgactggagagtcccaggccgcgggggacggagcgcccctgggatgcacgcccggctggcccggcctctgggcgcggtggtgagaggccctgacctagggggaccgcggggtgtggggagtgcggagccccactgggggcggggcgaggtgtccgtaggccccgcccaccagcccctcctccctcctgaggccccgcccccccatgcctgcctgcctttgccagcctcagccaggagaagggagcgggggagcggctggcagagacagaggagggtgtgacggcgttgctggtcccccatgggtccagagggcgagacagactccgaaggcacaccctccaggggcctgtgtaggcatcctcggccctccagcgaccacccccgcgtcggacagggtccacttccgagccacgg

SEQ ID NO: 10876 - DNA, 2906 bp, Homo sapiens; identical to SEQ ID NO: 5674

SEQ ID NO: 10877 - DNA, 2146 bp, Homo sapiens
cgaaagcggccctgagagcgtcctcggggctccttcgaagtgtccaaaccaccagcgtggccagcggccccgactccccaccacgtcctcctccgcgggcccaaagggacctgggccccgcaaacccctgccgagggagacgcccgccgaccccgccggcctacggggcgccctgctcccctcggggcggcttctcaggcaggctgagagcgaacgggatgagcacaccccggacgtccaagggggcgcccagcgcctcgaagccgccgccctggcctgcgtcgccgccggcctcgccttcccgggcaggctggaagcgccaggtgcccgcgcggctcacgcagtagatggcgccgtccagggcggcgcagcggaagggctgcaggcccgtggggccgccggggaggcgcaggggcgcgacgcacgggctccactgcttggccaggcagtggtatcgggacacgctgaccccgctcggccccgccgcctgcgcctcgccgcggctgccgctcagatcgaagcggtagatgaagccgtcgagagccaccatgtcggccgagcgctcgcggctgctgctgcacgggcactcctgccactcgtcgcgccgcgggtcatacttgagcaggcgatagaagagggagcccccggacacgtagatctcgccgtggcaggtggtggcctcatgcgccacggcgaaggcgccccggggcagcggcgccacgggggcccagcggtcggcgcgcgggtcgtagcgctccacgctgagcaggcactcgccgcccacggcgtagaggtgaccgtccagggccagcagccgcagctgcgagcgcgcctggcgcaggggcctcacggcgctccagctgtccgtggccgggttgtagcagaagacctggtcggacgggcgcgcgcggccgtcggggcccgcgggcgccacgccgcccgccacgaagaggtagttgtagaggacgcacaggccgcagccccgcgccggcgcgccctcgggcagccgcgtcagctcgcgccactctccggccgccgcgtggaagcagtagacggccgcgtccccgcgcgcgtccgcgtcccccgaggggctctgaggccggctgcccgcgcgctcccccgccggcccgagcgccgcggccaagaggtgggcgcggccggcgcgcaggcggcggcgcagcagcaggtcccgctctgcgcccgacaggcggccgaacacggcgggctcgcgcagcacctccagatagtggtcgctcatgaagcagtaggcggcgtcgcgcagctcgttcagccgctgccgcttggccgcgctcaggacctcgtagcagttggccaggctcagctgcggccccacggcgtcggtggcgcgctgcgcggcgccgggcagctgcaggcggcgcgcgccggccaccacctcggccacgttgtcgggccgcacgcccgccatgcgcccgctgtaggcgtcggcgaggagcagccgcagcgccgtcaggctcactccctgcacccgcagcacgtcccgcgacgcgcgcgcgcggaagtagtcgctgcgcgccgccagcaccgccttgtgcgcgcgcagccggcgccccgacacctccagcaccaggtccggctccccgtacaccgccccgaaccccgggggtacgggcgcgggctccccgggctcctcgggggacgcggggtcctcaagccaaacgcgcggttcgggggacggcgccgcgggctcttccgggcacgcgcgctcctcaggggacgcgagctcctccggggacgcggcgcccgcgctgccggcctcccactgccgctccaccacccgcgggccaccgctggagggcggggaggtggccgcgccttccgccgctgaggcgagggactgcggcggggactcttccccggagctgaagcacagggacgcgccgagactgcagggtgtctgcgccggggacgcggcgccctcgctctcgctctccccggcagccccgggctcagtccctgggtagaggacgcagggggccaccgcgtgctccatggccgggctgtgctgcgctgcgcccgcgcgcccccggttccgcagcctgcaggtctggccaaggtcgagccttactccggggtttccagcctcacagcttttcctggcacgcga

SEQ ID NO: 10878 - DNA, 865 bp, Homo sapiens
cgggagtcttctcctcccgtgcgccgctgcccgggacgagaaacccgtggggcatccaggactaggacacgaggtctcagcctgggcaggtggacaagctgtggggtcccaccctccgcaggcgatggcttcccaaagtctgtacaaaccggtttcgccgggccggccatgcccgcccctcttctcggcgtgggaagccctttcaaaagtggaggggagcgagtgtcgcgccctgccaaccccgactgcgcctgggccctccccgcgccgggctccggagccgcccctcctgactctgcgaccacggccggggaccctgcgcgcgcccgggaatgcagagtctccagcgccgcgcagggctcgccccgacctcggccggccctgggcaacccgctccgcggccagtccccactccaagatgtggctcggctcccacctccgcgggggggaaatgtcgggcgacccccacactgaccttcctgcgcacccagcgcaaactacgaacccagagttggagctgcccgcagaccccgcgcagccagaccccgcgcctttatcccgccccgccccgccccgcccggcgcaccaatccccggccgaggaggggccgcgtggcgccgcggggggcgggccgcgcacgccccccgcagggaggactcagggacagtcagggccccgggagagtccgcgcgcatcgcccggctccgcggcgccagccatggcgtccgtgcgtggccccgccagggatggggcgacgcggtcagagccgcacgcgaccgaaatccgcactctggagccgcagagcgcgcggtcttgctgtttagcggctccctggcaagtgacgtggggaagaaacgcagggcgc

SEQ ID NO: 10879 - DNA, 865 bp, Homo sapiens; identical to SEQ ID NO: 10878

SEQ ID NO: 10880 - DNA, 1463 bp, Homo sapiens
cgcaatttggggcccgcagacgcgcgtggacacaaaaacacacgctcccgagatccaccctccccgggccacactgtggggctgcgtccggggcacgggccatgcctgaaccttcttccaccgccgcgccccgggcccgcgccccgccggccgcccgcactgggtcccgcgtcgcccccgccaccacaccgagccgcccagtacctcctcctcctgaaggttggcctcgctcggggtgttctccttctcggctttgccgccgttgttcatcttcccggtccttcctcgccgggccgggcagggctggggcgcggggctgggcgagggcgcgctagcccactggagccttccccgggcgccggggctccctcgggcgggcgccgcgggctgtggggctggagctggagccggggcagtggctgtcgggctcgggttgggctggggctcccgcggcgagtctgcgacggcggcggcgggcgactcaggaagtgcaagggagagacggggcagggcgcgggccgggagcggggcaccgagacaatcgggccccgggagggcgacctggagagggagggcgggagccaggggaggaaggaagaaggaaggaaggaaggaagcaaaggatggggcgaggacgcgcgtcccaggagtaagcgcggagagttggggctgggggctgcagccgctggaaggaggggacgggggtgcctagagaggaggaggaggaggaagaggaggaggaggagcggggcggaggagcgcgggccgcggctgggacgctgggacccgagagccgctgagtacgcgctccaggcaggctctgggaagtccgggatggaagcagctccctttctctcgccttcctccctcccctctcccctccctcctctccgcgcctctcctcctccctccgccctccctggacgtgggctgccggctgcagcccggagggacggggcgcgggacggagccccccgcgggaggaggggccggcggccggatggcgcgcgccggggaggggcagcgggccgcgggcggaagcggcgaccccagcccccgactcagcggctggtcggagggcgagggcccgggaggccgagggcagggaggtcgggtcccgccgttcccttggcccccgggggccccggcgtctgcgcgccccgggacttcggggaccctgccccgccggggcctggaccgggacctgggatgtgtgcgacttttagtttgccggcttttaccgagggatttgcacccctggccctaagcccacccttcccgagccagacccggttcttcctctgctgcttgaatgacagcatgagaactcgagggacaccggggacagcccactccgggccggctttttcaggacagggcttcaaacccatctccagcgcgggtcctgcgacgcgcccggagccttccccgcttcgcttcctgagcgtcccgcggccccccga

SEQ ID NO: 10881 - DNA, 1437 bp, Homo sapiens
cggtcccccggagctgaggtctgcgcgactggatttaggggcagaatgagtgcgtcgggaaccccaaaaccctagatcaagatacaaggggagtcgacggcccggaaacctcgctgcgggtgccctaagcgcgaggccgcccgggcagggccgcccagggaccggggcgctgggtgcggggcacggggctccacctcccgcgggctggggcgcgcagcgcgcggcccctttaagaaagttcgccgggcgagttcatcaaagtttaaaaactcgccgtggagaagggcgcgggggaagaggagagagggagagcgctgacccaggcgagagagaggggaaaggcccggccggaggccggcgccccgcggccggggccggggcgagcccacggtgggcggtggggattggctgcgcgttcccccggagaccgcgcggcgggcgggggagggggctggccgggccccagctgaggccggttccggccccgccccccgccgccggcgcccgccccctcccccggcgcccgccccccgccgccgctgccgccgccgccgccgccgcggcgcactcgccggtcgcagtgaaaaggcggaggcggcggcccctccggctcccactgcctcccccgccgcaccccctccccaccttccgcacccgccaaacttgatgtgaccctggcccgacgcggaggctgcccctctcactgccccgtgggtcccccgccacccgctccgcacccgcgagcgcaccgctccccgcgccccttcccacttcccgcggggccggcgccgcgctcgccctcgcgttccttcccgccgccccctcccccgcaccatgagcaacctgaagccggacggcgagcacggcggcagcaccggcaccggctccggcgcgggctccggcggcgccctggaggaggaggtgggtctgtggccccgggacttgccgggtgaagcgcacgccaggcgggcgcgggagagggcgagcggggcctgccgcgcctcgcggggccggggtggccatcgctcccggcgccttcccgccgctgccctctcgcccgggtaggagcggcccgtgtccgcgggcgggagcgtgcggcctggactgccccgccggacaggcattgtctccccgccctctcgggctcgaggcgggccgcgcgcgccggccgccgtccgggcgtcccgcggtgggcgagatgcgccgcgtccgttccatgcctgccgcccgcgcgccccttgctccccaccccgtagccgctcgccgccctcctccgaggcgcacctcctgcgtggccaggaccccgcctcggcggcacggagcggagcgggattagcacggcccgagggcggcaccctcactccactgccttttccgccctgaccccctccccgtgaccttggaggcctgggccggccggctcctcggttcctgcga

SEQ ID NO: 10882 - DNA, 717 bp, Homo sapiens
cgaggagaaaggccgccaaacggagcgagagctcccatttccacccaccccagtgctatggtggcacatgccgaccaccacctgcgaggcctcttcgcagacttgctccctcggcttcgcagcgcggacgacccgcagcgtctcacggctatggccttcttcacaggggtgagcctgcttcccggatgggtggtgaagggtgaccctggacttgatccctgaatcgcagcggcctgcacggggaccgcgggcgtgctgaccccatgtgcctcgcctagctgttgcagagccggcccaccgcacggctcctgcgggaggaggtcatcctggagcgactcctcacctggcagggagaccccgaacccactgtgcgctggttgggcctgctgggcctgggccacctcgcgctgaatcgcaggaaggtgtgagagaaggggaggggtggagaggggcttggcccggtcgcggcgaggtctgcaagaggctgaccccgagtcccagcaggtgcggcacgtgagcacgctgctgccggcgctcctgggcgcactgggcgaaggcgacgcgcggctcgtgggtgcagcgctgggcgccctgaggaggctcctgctgcggccccgggcgcctgtgcggctcctgagcgcggagctgggaccgcgcctccctccgctactggacgacgtgagcaaacgccccgcctccgggtcccgcccctgccgc

SEQ ID NO: 10883 - DNA, 1713 bp, Homo sapiens
cggtagcgaattaagctgcgcaggcgccttgcttccccctccatcaacatgttcgattggcctacgattgattacatcattggtccgcgcaaccctagcaggcttctgggcctgtagctgagccgaagctcttccttttgcgtagcggggcggggcacgatggtggcggggggggaggggggaattgttctactacgcatgcgcaccggggatggcgacagggcctctttctttgcttctctccacagctcttcccagccggggggctgagtgccctcccccttctctccctgcccctcccctttctcccccctcaccgcccagcggggcttctaactgacagttgtcgccgggccccgtccgtgcaccgcctccttctgcccgtgtcccccgcaggtagaggggggcgggagggggtgtgagggagaggaggagccggagccgccgctgcggccccctccggggaggggagaggagaacccccttcctcctcgccccctcccagccccccgctggcccgggagggggtggggcgccgaggccgcggcgacccggcagggcctggccggtgaagagcaggcgggcggggtgcggaggggtgaggccggcgagggccgtgcgcgcgccgccgccgggggggaggggagaggagggcacctaggctctcctcttctctcccccctcctcgcgcgccatgtaaccccgccccgccggcggtgagctcaagacccccgcgcgcaccgagccgagccggcggctgaggagagccaggcccgatgtggcgggggctacgcgccgcggccgagccgtgaggaagcggctcgcgctcacgcgtcccccagcacctcgagcggctgttccacaccgcccagcctaggcctgccggggcatgagtgtgcccgggacgccgggagcgatggagccggctggggaggaagagcggccgccaccggcggccgaaggagaggacgacgaggaggaggtggcagcggcggcccagacctcagggccggcccacggaaggagtgcctcctcgctggaggacgcggacgatcaggaggaagagatggaggcgatggtgatcggaggcggttgctgcaaggagcaggagctgacctacgagctacagcagggctaccgcatcctgggcgagttcctgcaggagaagcaccggggcctcaccgccccctttctgcagcccttggggggcgttgccaccgcggaggaggaggtggcggaagggccgcgcagcgggggccggggcggtcgcgccttcccgcagcagcccggacagggcatgtgtctgctgcagatggaagagaagttcgccagcggccagtacgggggcatcaccgagttcgtggcggacttcaggttgatgctggagacgtgctaccgcctgcacggagtggaccactggatctccaaacagggccagaagctggagatgatgctggagcagaagttagcgcttctctctcggtaagcgagcccggtccccggtgggactgacagactgacacaaacacacactcacacgtgcccgaggatgggctgggccaggggcctgggggcggcgctgataggtgctgagtcggtgctggagaagcccgggaggaggagcggcgctgggcggggaccggaggggtgtggtgggtgtgggccgaacccggcttgcgcgtagactgagaaggaaacccgagtctgcagcgc

SEQ ID NO: 10884 - DNA, 699 bp, Homo sapiens
cgcgcgaaccgctttaccctggatccctggaatcgtgcctaggcacccgggcggcggggtccgcccaggccgcgtcaggcagctctgggccggtgggtgccgggtctcccctcctcccgccccatctggcgcgcccgcagcgccgccgccgccgccgcttctctccccagcgggcgctcggagcatcccgcgccgcgttctccccgccccggcccccgcccgccggagcggggcccacgccgctggcagccatcaagtggctcgttaaggaaatgcaggtgagtgcgtgaggccgagcggcagctgctggagacgtggggtgtgtgcctgtgagtgcgagcgagacgaggagggagcgccagcgagcgagcgagcgagtgcgggagcggccgcctcggctccccgcccagccgcgcccgcagccggcggccggagcgcgtgggggcagcgcctcgccccgacagagcctcgcctcctccttgccgtctcggctgcttctccgaggagccgggagccgctcatcggcctccccaaccctgcgctcccctcccagcccgagtcctcccgctgctctttctcctcctcctcccgagcctcctcccctccggcgcggcgccgccagccagcctcggcggggagagtgcaggtactttgccttcagaataattagcaggacccaagccggctttccgagcgcgc

SEQ ID NO: 10885 - DNA, 1191 bp, Homo sapiens
cggagcgggcgaggacggctagttcctgcagtgcccaggcctgcacggaagcgccctggcacaactcagctgaggatacacgctttttcccgcgcagccggagggctgaacagcaaagcactccccgggggaactgtgtgtcagcgcagcctggagagagcaggcccagggggcagctccaccacaggagacaggacacgcctcagtctgggcaaattcccggcctcctttggctctaagccagcagccgccgcccgcgacctcctctcctcctccgtcgtcaccccggccgccctgccagccccgaacttgcccgcgcctggccgcgcggcccctcagcccacggggctggcggcgcggttgggatgggaccgatgtggcgcatgcgtggtggcgccactaggcgcgggagttgctgcggcggggacggtgctgcggacggccgagggccaggccgctccggccgggctcgtggtgggggcagccccagcggcggcggcggcggcgtgggctggcgaggccgcgcggacggcgcccgacagcagctggaggagcggtttgccgacctggcggcgagccacttggaggccatccgtgcgcgggacgagtgggaccggcagaacgcgcggctgcgtcaggagaacgcccggctgcggctcgagaaccggcggctgaagcgcgagaaccgcagcctcttccgtcaggctttgcggctccccggcgaaggcggcaacgggacgcccgcggaggcacgccgggtccctgaagaggccagcacgaaccggagggctagagacagcggccgagaggacgagccgggcagccccagggccctgagggcccgacttgagaagctggaagccatgtaccgccgggccctgctgcagctgcacctcgagcagcggggaccacgtccgagcggggacaaggaggagcagcctctacaggaacccgactccggcctccgctcccgggactcggagccctctgggccctggctgtagccgaggccgcagccggtgagaggcggagcctcgagcgggcccctcctcctccgttcccagctacccccgacctcgcgcacgccctggcccgctccctgcccgcggataccttggactacggtgccttcccgcccccaccagtggacacttccgggtggcgcttggccatccgcttggtggaggtcga

SEQ ID NO: 10886 - DNA, 536 bp, Homo sapiens
cggacgggatgtaaagtttgggtgagacggtcaccggacgtccactggaagggtgcggggacctctacgccgacaccccgcctccccgcctcagtccgcgcactcaccgcgcacgcagagcagtgacatggccgaggatcgggcaagcctctgccgcgccccagccgcgccggaccgctccctctttcctctcagcaggtgccgcgactgctctcgttaccggccccacgggtctggcagctcctcatggtcccggtcgcaggtagcgtcccgccgctgcctcggacccgccccaaatctcaccgtctgagcgaactccgggtagcggtgagtaccggccggcaggctggggactgggcgcggcacagcgacgccatcgctgggaggtaggagctgccgggactccctcccgtcattccacccgggatccgcgcgagcgcctgggcggagccaacccgtggtgccccgccccccagccaattaactcacgcccagtccaccgaccccgcccccccccgcgagcacgtaggaggcgg

SEQ ID NO: 10887 - DNA, 728 bp, Homo sapiens
cggccaacacggccaggcctcccgggcgccccaaggcctcgtcaactctggcaaaggcggtgctgaggtgaaccacgtggatctgaaaaggacacgagggtaggagagggccacgtctctggccccgctccgccccgctcctttgccccttctcggccagctccgcgctcacctcggcagggaaacggtggccttccacagtgtgctccgagcccggacgacctgcagccccccagtgcagatgcagctgcagagcccggtactcccgcccgggacccagagccatctctagcccaggaggcagggtcagttgcactgcgtagggagaggcaagtgagccggccccgcccggtagggccagcccaacccccgggcaggcactgccgcgacggttcccttccctgcgccccgccccatccccaagtctcggcggggagaccccctcaccactgtggccattgttgcgcaggcgcagttctgggagcggcgggagctggaagcccaggagttccagggggcgcagggccgggcagaaggcggcgagctgggggcggatatccaccggggactggaagcggcccgcgcaggctggggacacccggggccagggcgggtcgcctggggtgggagagtatagtgaggaagtctgacgcctaggtcaggaacttagggaacccgggtagaaaaggtgagggggtgggacggtgggcggcgggtgggacgcccgg

SEQ ID NO: 10888 - DNA, 1431 bp, Homo sapiens
cgagccacgttgcctttctgggagctcatcgccgaaatcaaagccacccctcgccgggagcaggcaaaaggatgaggggaaagaaaaccaacgaactactcccaggaattgacgcttctgtcaatgacccggaagaaacaaacgcagcctttccgccccggctctgggtcagcccacgtgactcttctgggaggtcaaagagcatcgctctgccctccctgctgttaagccaagccactccacgcggcgcagcctcgacccctccggctccgcgcagcctctttctcaaacccggagaacaagtcccactttcttcgaaatgagaattcccccattggcccgaatgtgtagtccatcaaatcaaaggggcggggaacctttgttcctattggttcttcttttccgcaatccccgcctcctgctgagcgagctcagcctctccttgagctcagagcgcctcccaccctgccgggcggcctctgattggtggaagtgaggcaaggctgggctccgtctctccccccgcccgctagtaggctggagccggggtcagctttggcaccttcctccagtcagtggccaactcctggctcagtggggattgtgctcgtcccctccgttcccctccagtcttcctcccgctaccggaacgagcctcgcgcttggcaggctgaggaggagcaaagaaagcaggattaaagagaaggaagacctggctaggtctgggtggcgtctgcagtgccagaaagggaggcggtggcggcggcggctgcgaccacggccgcgcgggacgtgaggcccgagagcaaccgacgggcagcggcggccgctccagcgccccgcaccggggccgttagtcagcagaacgcgagctcttgtggaggagcagggccggcgcgaggcgagactcgggagcgtgagcggggcccctggggcgccgccgtccttcttcgccccggcgccgggggctgtagccctggtccccgctcctctgtcgggccagtctgcaggcggagagagtcggacggcgcccggagcgcggatctcgccttgtggaggacagcgcgtcggctgcggttctctctcgaccccttctgcccggcgcttcggcccgggccgctcaggtgcaggtgcgtgcggcctcggggtttggggacgccgcagcccggctcggggagggggcgctaggccgggagccgcagcgcgggagggacgagcccgggccggcggggggaggggagcgggaagcgtctttgttgttggcgaccgggatcccttctcggcacaggggaaaggcggggaagccactcctcatcgggtctgtgtttttgagaggattctctgatggttgcgtgaaggggagcggtaggacagtccctgcggtccgtggagcggccggagtcagggggtgggggagggaggaccgaccga

SEQ ID NO: 10889 - DNA, 588 bp, Homo sapiens
cgacctactttgcgagctcgggtgggagtcccaggcctgtaggggccgcgtggcgccaccttccgatcgcgatctccaatggcgagtccgtgcggcccccagtgcgccgctccctcctgcgggccggtggggtctgcgagaatccggggctgggggcgggtctggtagtggcgggcggggacctcgggtcgggaccgagaagcgcctccgaacggcagttatactggggctgctcagtggcctgagctcctccctgccccctccccacattcctttgttctggcgcggggggtcctcgcggcgccgaggccccgctgcgccgcccacccggagggaggagggtctctgggaggcgccgcgtgggggcgcggcccgtggagcccgggcgctagggaccggccggggccggcgtacgggtgcgctctgggttcgcccgggccgcgggagccagggagccagggagccagggaccccggctcccgcacggggcagacaggggcagcgcgggcgacccggagcgcctgcgtctccgcggccctccttccaacagggcaaatccaggggcctgactccgcgcctgttctgcgg

SEQ ID NO: 10890 - DNA, 1203 bp, Homo sapiens
cgcttctctgaagtccgcctcccagcggcctggagcccggggcgtggtcggctcgaatctgctccccaggcccagaacggagcccgcagcccgtaacccgctgtggccgcagcgggtcgcgcccttcgtccccgcctcaggagcggccgaggatctgcccagctgcgggcgccaagccctggccgcactcctttccccggcggagggagccggctggcgctgcggccttcaaggcgcgcggacgtcgcggagggcagccagtcgcgcgggagcgggtagcgcgcgcgagggcgttgggcgccgccgcgaggcggggaagcgcggggccgcggcggtgcgggttctagggcggcggccgtcgccgtcgcagcagcgccccgagcggggagggccgaggaggcccgacgagctggggatggagagtaccgggcccctcactgcctcagagcgcgtgtgcggctctgggcgcgcacagtgacggtgacggcacccctggcccggcagcgccgaggccgcttcgccagacagccagcggccggcggcaggccgggccatgagcggcaggggccgggccgggcctcgctgaccctggctccgcgcggcagcttccccagtttccgctccggtctctcggcatgagagtccgcccgggcccggggctgcggctgccccagacccgccgcacgctggcgcgctccgggcccgcggagccgcggtgctgatacctgcgccgcactgcgccgcccgcccgtccgctgtgtgccccgggggcgcggccatggaggtggtgggtgacttcgagtacagcaagagggatctcgtgggacacggggccttcgccgtggtcttccgggggcggcaccgccaggtgagcgccggccggggcgaggccgggccccgggcggcaggcacggggctaggtggttctgaaacttggcgcagccgcgagccgagacccccgactcggctagccgcccgggtatgctattgtgcgcgcagcccgtctcgccgtttgttttggtcctgtgagggttgttgtgaggcccaagcctctggcagcgctccgcctaccgaccggctgctgctgatcctcctgtgtgcccggggcccaccccgcggtccgcccgcaggagcgtttgcacccaggttaccctggacccaaaatagacggtactgcaccgtgcagactcgagggttgggcgt

SEQ ID NO: 10891 - DNA, 5370 bp, Homo sapiens; identical to SEQ ID NO: 5724

SEQ ID NO: 10892 - DNA, 1691 bp, Homo sapiens
cgagaataaacgtcagtccctacctttgtggaacgtccaacgcagctggctgggggaacacgaggccttgcagggagcgagccccggccccggtctgacggaacacaggcgacgcacgtgaagtccaggccctatcccagcgcaggcgggcctccagcgacccacagttgtcacatatccggccagcgccgactcccgaaggcgcactccccatactccactccgagcaccggtcccatcgttagggaaggtccccctggatagcaaggccggggcccaggatctgcgagacccaccccacccgccccgtcagagcccaggagcagcaacaggtctgcgctctccccgggcggcgctctgcagaccctcgacgggccaagggtgcccccagcccagccgtgcgctcaggccggggagatgggcggaggactggggctcccgacttccttgacagtttctgcgcgtcagaaactgagcagacacggggcccgcgccacctcgcccgccgcttgccccactccgcgaggctgcgcttccacccgggtccgggagggccggcccgcgtcccgggtatgaatggggctcttctccccaacagcggggaaatcccgccaccgccctccaccccggtccccggagcccgcggtggcgcaggtttgcccagcaagcccctgaatcggcagacaaaggggcaccggaggaaaagccgagcgcttccctaaacttaccggccacttccccctccccaaaacaaaggagccccccgccgacctccgtctctccccgcaaggcgcgccggcacttcggggagcggccacctcggggtattgttcaggctcctgggagcgcgccgcaccccagtccgagcgccgcggggacagttggcgacctgcacctacaggagttccaggggcgggtggagcgttcgggcgccccgagccgccggccggaccctggagggtcagcgcgggacccgcctccccgcagaagtttgcggaccccgcgcccggcccgccgagccctgcgcactcacctcgtcgcgagcagcgcaacttgtggcggcgccgcgcgcccggccgcgctccgaacctccctccagccggcagcctccgagtcccggccgtgcggcggccgaagagggcccggcgccccggagcagccgcgcgccgcccccgggccgcccccgccccgccgccgccgagtcccggagagagcgcgggcgctggaaagtttcggtggcgaatggcggcctgagggcgctgcggcggcggcggggcgggggcgctggcggctcctcgctcccaagcgcggagtgggggcgctgaggcgggcgcggcggcggcggcggcggcagcgggagagggcgggacagcgggagggactggcacggacagtgacctccacggggagctgccgcgagcgcgcggaccccagccaggaggaccgccaggggtccgcccccgccgccggcccctccctcacggccgtgggaggggacccggcgtaccacccggccccgcccctgcgccccgggggagccgcgtcccgaaccagcccctcccctacgagggtagggactccggccctgcccctcccccgcggctcctagtggggacccgcgtcccaacccagcccctgtcccacggtcgggggaccagcgtccctaccaagcccgccccgctcccccacgc

SEQ ID NO: 10893 - DNA, 1223 bp, Homo sapiens
cggaatgccacctgccccgactgccctcgggtggctacaggcgcgggggaaggcgcagggccaggggcgctgagggtgaaacggtcccggcgtccgggcggcggcggtggccgcctgcggcagctcagctgaaacgcagcggaaactgcagccagtcacggggctgcgggaggcaaggcaggaaggtggcgctgccgccgagcgcctggagcccgagcgctcatcatggcggcaagggcaatggccgccacggggagcgagcacgcccctccgcgcgcacacgccgccgcgccgggcctccggggcccgtcaccggcgccgctgccgccgccgcccgctctcccaccccccctcacgggctgtagcggaattttctctccagacaccgcctccaagatggcggctccccctcccggcaaccccctctatcgtcccctgcagcaggcgccgagccgccgccatcttgtcccccgtccctccccccccctcaccgatatttacatagcgaaaatcggcccggccggcctgcggccttcacctcacgcctgcagccttcgcctcctcgccaggcctcaccccggcgcggtgccccaggtcggccgcggagccgacccggggcccctcgaccgcctccggcacaaccgggcgaccctcccccaacccccgcccgcttacggagcgcgcctccgccgccgctcggggcagccgggctcctccccgggcctaactgcggcctcctcggggcctgctcggcgccgcgcgccacgccgcccggcctagcgcgggagggcgccttgcgggccgccgaccaggccgagaccaggccgctgtgcgcgcactaggccccgcggccgcggcggcacccgggactcaccggacggacgtgcgggcggccggcgacggtggcgggtgctgcaggccggcctttctctggagcactgggccgggctccggctggtggggcgggcggagggagggaggaggggccgagctcggagctgacaaaaagcggcccagctccccggcacgggcccgccgtcagcacgtcacgtcaccgcccgggagagagacccaggaaaatgcggaagggtagacaggccccctcctccgcccggtgggtcctcctggcaccccgtgtcggcgccgctcccgccccgcgaccggggagcccagtggcctcgctgcggcggggtctccggcggccggagtctccgtgacagcgc

SEQ ID NO: 10894 - DNA, 1103 bp, Homo sapiens
cgaggcacgcaccaggggggacctcgcactcgcagtccctcgtcccgcaccccgcagcccgggacggcccctggcccccggcctcagcgaggccgccgaagccgcagtacccagccctggaaggccaggcagccgggaccgcagggaccagccccgagcggcggcggcggcggggcagaagggcagccgctcccccgggacccaggacgccggcgggcgggaggcacacacgcgcgcacaagcggaaagaaagcgggcttactgcgtggggatgctcgcccgcgcagctgtctcggcggcggcggccgctgcctgcaccgaggccgaggcgcggcggtggcggcggcggctgcggactgagccccctccgccgggcggtggatgtagggcgcgggaggggcgcgaggggaggggtgcgcgcctgggaggcggggagggaaagaggggaggaagcaggagcgcgggggcgggcgcggctagccaggggcggggcggggcgcgcgcggggccgggctctgcccactgcacggaggctgtgtgcggggcgcgcgcgcgggagacggccggacgggcgtggggagaggggcggcttgccacgcaccccgcgcgcccacgtgcccccgccactggagagggccgggcacgcggagagggtggctgcggggacgcggtggcaggctctttcccgaggaccggctcggatccgaagaccgggaggagggcgggccgggggcgcctcgggccccctccctcgcgcagcggtccttagaggcctgcgggagtcacgaatcactgcaggcggctggggctggggaggtgggagcaacaaagacagccaagtgagggtggcgtctcgcctcaccggggtcctcgctaacctgcgcactccctgaaaagcggccccgcttcggggcccacgccgtttcggcctccgacttcggaacccggtggcttgcagcggcgccgaaaggcccaccgacgacccctccccttagtagcaagccggagggagctaaataagccccatccataatcccagtgccaccatccagagcgttttaacgtcactcagaaagcaccgatggcaaagcggcgcgtggcgt

SEQ ID NO: 10895 - DNA, 616 bp, Homo sapiens
cgcatccaatggcgactcgacagccctacctggcaccggtgcccggctcgtggggcgggtggagggtcgggcagtcgcagggcgcgggctccctcgggtggacggcgcccggccgggccgggccgggccggggaggcaggcgcggggcgcggggcgcggtgcacagcggggagcgcgcagggaggcgaggaggcgcggactgggctccgcccgcaggagaacaaacaggttttctccggccgcccggagcctcgcccctcgcccctcccctcggccggccccttcctctgcccctcctggggtaggtagaggcgcctggcacattccgcacattctcccgccagcgtcctccgcccgcccgccccttctcggccccgccccgcggggctgctggagaaatcaagtctggggctccccttgtcgagcacggggcgagctccagaaggctctgccgtgatggaaaacttccaggcaaattcctccgggcccgtggcccccaggccgggaagcctccgccacgtgaagggcccccgctcctagttgcgcgatctggccccggcacagggccaacgacttccacagatgctgtcgggttaattcagtcgagaactaccgt

SEQ ID NO: 10896 - DNA, 206 bp, Homo sapiens
cgccaaaggcgacgtgccggccgccagctccaggccgagccccgagcgcctgcaggaacacgccccttcacccggcgcgggacgcagagctgcgagagaatcttgttcagcgcggactcaacgccagggcgccgcctagaggttggtctctgtctcggcctcacccgccgggagaccacagagctgcttccccagccgcccgccgc

SEQ ID NO: 10897 - DNA, 1141 bp, Homo sapiens
cgtactaactggcgtgtgcaggcgctgctgcttcgcgctgcgcacggagaagcgccccgaatccaccgcacgatgcggagccaggggcagcgagtgagcggcggcctccagccctcccctgccttctccttgccccttttgggaatggcagggggtttcctatgacaaatgcccgcaaacaggacagggttcggacgaccccagagccggcgccttctccctacactctcagccctagggccggacccgcccccgcggctgccatcgcccctgcctcgggcgccccgcggggaccaccccgccaggtgagcgcctccaggagcctctctgaaactcacctgcgtgaagtacaagttcatcagcgtgagggtgaaaaactgcaggcacacagggaagcagtagagcagccagaagacgaaggggctgagcgaattggccgccacgaagtctttgaagtagaaggagaagaggacggtccgcagggaggcccagaagaggcagagaaagaggaagacgctctggtagctgagccgcttgtggcggtaacgcagcaccagccagagctgcacgtagatgaacacgaagagcagcgcgtagaacacggtgtagacgacggtgaggccaagcttcacgtaggggggcacggccggggtcagcgtgggcggcagcgagtcgttgcgggctgggtcccacggcggggtctccatcgggccgggggcgctgccgcgcggccggggacgctcgggcctcatcggggctcacggccgccgccgcccccgcgggggtctccgcgcatcgcgctcagcctgcagccccgagactggaggaaagaaaacaagccgcacttcctcccccggcaccacatgattcactgggacggcctttgtctgcgattggcagcgccgcgcccgccgcccccgcgcgccgaccggccccgcgcgcccccgccccggcccgcgcgcccccgccccggcccgcgcgccccggcccgccctcccccgggcaccgcgcgccttcgccccgcgaaccccggcccgccctatcctcgccaccgcgcgctcccgcagtgcgcgcccccagagccgcacgcctcctcccggccccctccccatccccggggccgcgcgctcccagactgcgg

SEQ ID NO: 10898 - DNA, 1819 bp, Homo sapiens
cgcggacgcaggacgcagagccccagcaccggcagtcaagaggacgcaggaaagcgcacgcactcacaggctcagagacgcggacgccagacccaggcttggacagagcagccccgcaagtcccaacacactttgtaaaccccgaagacaggagagagccaaaatactctccctgcccgcacgcaggccccttctgtcccccacggcccgattctgggaggcggatgaggatatccccaggcctggatgggggccatgggacatcccactctagaccctgccacgacctgggctgtgtccgttcggtgctcccggcccacgggctgcacaacttggcggccccgaaactggcgtgggggaggggagggctgtccacccgagcaggacgcggctgtccactcagtcggaggtgaggaacgacctccctatcccgttgccgggtccaagcggggcccgagagccgccggggagagccaaagggaggggaccgatggatttcccagagtgaaactgtgcgtcctggagagttccgaggcagcctcgcgagccctcgaggaggtcgctgtcgcttggcaaacacaaacaacaataaaaggaaggaaacccaggcggcagtgcgcagaacgagcacagggtcctgtgagggcgcgcagggtctacgcgggtgcccctaacagggtcccccacgtaggcggcgcgggcacggggccgggggcgcgcggcgctctcagcgggagggcgcctggattaggggtcccgtctcccctcagcgcactcccgtctcccctcagcgcacccccgtcccgcgccaggcccacccgcagggtcctctccagcacgtccgcggccgcagcagccagcccagcacccaccttcgaagtccgaaatgatcccatccagctgcgcgttgaccgcggggtccgacatgatggctggtgggcagcgggtcgcgcggagggcagcggcgaggaagcgcccccggcggggcccgggccctgcgcgctggctggggcgccgcgcccgcgctcctgcagtgcagagctagccgccggaggagcccctaggccccctggctcagctgaatgaatgggggaggaaggcgggcgccggcccctccccgcgcgctgcgcccccgccccgcccccgcctcccgggcggatcaggttcccgcacccgcaccggcctccctgtctcgcactggctgctccgcccgcctgtcaaggccaggcctggggggctggggcccgagtggccgctgggggacagtcctgggcacacgaccggagcgcccccctcctccccgcctggcccgcgcccaggggacggcgagagacgcggcctcagcccctccccccgggcgccccgctgcggccagatgtgggcggatgtggaggccgggccatggcgaggagggcgggcgcccagaggggaagagattcctccccttccccgggcgcagggtccttctgcaggaggctgtatttgggcagccaaacaaagttctctgtcaccgccgccgcgcgctctgcgcctgcaagggttaaacggcagcgcacgcggctggcaggcaggatcccggcctgtgggctcaagagccgaggggcgcagggcgaacatgcgagtcccatggcaccagcgagaggccaccaactcccacccaccgagggcacccctgcagctaacacccccaccacgaccaccgccccgggggccaccgctgcaccctcctgggtgagccctggagaaggcactgtccgggagaaggggcacagggcggggatggaacacggctgtcagagaagccagggacgggcgacgc

SEQ ID NO: 10899 - DNA, 1813 bp, Homo sapiens
cgagtccactccaccaacgccaaacccgccagccccgccagccggctgcaggaccgagggagggtgcaaaaggcggggggcggagggggggtagatcagattaggcgaaactcaataagctcccagccctccagcccaaagcttccaccatcgccgccaccaacgagccactccaattgagccagcatcgccgcccacccgccggcccgccggaatcgcgcccatctcctgcaacctcgcccggaccggcatcccgccccctcggcccggtctcccccttcccgccgggtgcaaagtcaaagacccagcaaggcgacgtgaacttttgcatgcagggcacacacgtcgcccccggttccgggagtgcgggggcccgcggcgcggagggaggctgggcgcccgggctcccgggccaaggtcgccgcgcgtgctcacccatgtcccggcggctccggctccgctggccccggcgctcgctcagatcccggctcccgtcgctcgcccgagcccccaaaggtgctgctgcggcaactccatggcgatgagcatctgtcaaacggcgagccgcgagctggccgccctagctcggggggcgccggggcccccgggcgcgcggaggcggcggcgagcggcgggcgccccggccggccccgcgcttcccgcccgactctgccgcctccgccgcgccaccgatttatggagagagatatcaagggggaaaatggcgtctccggagcccgaggagtcctggagtaatcacattcacacacacacgcccgcacgcacacacactcgcacacactggcacacaggcgcgcggcgagccctgctaattttagcaggagccaaaaaaaattttatatatatatatatatatatatatatatatatatccccgtctctccgatcaatgctttttctttttttgcttttttttttttttttttttttttttttgcttttcttcaaaggatgggttggagcgttaaaaaatgttggtgggtttgggctcgcaggaggcggcgcgcggagggcgagggcgcttttgctgagctgtgcagttcggtccgctgagcccggcggccctgcccgcccgctcgtccgcccgcggtcgctagtgttgccgccgccgccgccgccgccgccgctgctgctccatggccgcgcccgccccgcgcccccgccgcgtcccgtcgccgcccgcccgcgtccccggtgagcgctggagtggggtcgggcccgtgtgcctgcctcccgcgccctctccgaatcccggactcctagtgaaaggaagggggagggcgcgggcgcggaagggaggtggatcggagcggcagcgcggcccagccgaacgggtaccgaccgtcaccccgcgatcttcctcgcagggggcgccggcgcccaagctgctcgcccggagggcccagagccgcttcccagaccagagccgggggaggcgcagccagtagcgagccctgagcgacctctctccccactcgcccccctgccccagtgaatttctgtcagttgaagggagcggggctcttgcccggggaaaaggaaaacagttcgtggcctgggatctgggaccccttgccgcccccagcgcccctcccgctccccggcgcccttgcggcccagtggctcctgcgcgccggagtccgccgcgaagactgagcggccgcggggatcgccgcgggctccgcgcgtattcctgggctcaacactgccactatctgacacaacaggagcagtgtcgggggggtactgcgcgcccagacgtgagctgtgataggctctcgaaactgggcgc

SEQ ID NO: 10900 - DNA, 1872 bp, Homo sapiens
cgtggacagaaagcacgcgcaaggggttccggggacaggaagccaccagcctggggagcgggaggcactggacatttccccgccccgcggtcggtacgggtgcgcgtgcggcagcggcggcaggggctccccgccctgcccggggtccccggtcgtgccccgccgcccgggccgcgctcggggttgattcgtaccaccttgcaaggaagtgaacgcttcgcacgggaaggggaggcgcctgcgccggccgccgcgcagctccggggacgcccggggctgccgccggctcggggccgcagacgaccgcgggacgcgcgagtcccccgtccccccttgcccgccgtcccccccgccacccttgcccgagaggagtcaaatccggcttttagagctcggggagggtggggatatccggtgcctctcccgcgccaggaggaagggggagggcggagaggatccttggccagtctgcgccgagcagattcaaaccaaaacaaaaagattaaaggagcagcggccggggcggcagcggtccccaggccgggacacccggggtggtgcgcccgggttcgcgggggctgcgccggcgccggggaggcggggggagcgggagcgggcgacgcggggaaggggggagccagggggagggcgccggccggaggaggggcggacccgcccgccctagccgagcagagcacagccgagccgagcggcccgggcgggggccgaccccggccagcgtcggcgcagagagcgggcggaggcgcaggccatgctgcggctggtgcccaccggggcccgggccatcgtggacatgtcgtacgcccgccacttcctggacttccagggctccgccattccccaagccatgcagaagctggtggtgacccggctgagccccaacttccgcgaggccgtcaccctgagccgggactgcccggtgccgctccccggggacggagacctcctcgtccggaaccggtgagcccggcgccccccaaccccacgcccccgttctcgccccgggctcgcgccgcgccgcgccgctcccgcagtccccagcccgcccgcgtgcccacactccggcgcgcgctcgggcgcacagcctgagtttgcgagatcccgggaagttgaacccgccgccatctggcgaaggcgaatgtgatgtgactgttgctggtgtgaatatccgatgccaccgaacgtcctcataactgagggttattttaatttgggattcccctcccctcctccagccctccctcctccccctcccgctcccgaaataaaaccgacgggacccagaaggggaggctccccgccgggccgcccgcgcgcacccacagttcctgcgttgacataatctttagggtggagcgggagcagcctggacgcaaactgcgacgtttaggtaaacgtgcttcggaggaaggaggctgggacccggctggctttccctgttccctccaggttggcagccgcctcgcagtggcggagcctgtcgttggatgtgtgggtgtgcacctcgccggtgttgtctgcgtgctgtcagtgcagtgtgactgttgtctgtcccctgagtgttaacgaccgccgcgtggcgcgtgtcccgggcagctgggccagggtcggggtgggggcatggctgcctttgccggcacgttttgcagacattcaggtgacaccgggttgttgcgagaccttctggcttttccattccccgcgctccccaccgtcgtgtttccgcctcactcatctttagtaactggcgaagcaacagggaggaaacggacctcactctttatcggagccatgcccgcttaggtctttgctccgtgggtccctggctgcccgacttgactggcaaggcgc

SEQ ID NO: 10901 - DNA, 652 bp, Homo sapiens
cgctttcccggtggagacggcgacgtggcccacacgcgagcccctcgccgaggatgaatcaccagccagctcgagttgccacactttatctcagtacagttatcgcgagagtcccggggccgcgccggcgtgctctacgcacgcgcagtctttcgcggggccggccagtggtgccgtcgaggcggggggagtggccgccgcgccggccgagtgaggtagggtcacacgcaggcgcactcgcgcgccgacagctcgtgcaccgtgtggtagcggctgtgcgcgtccaggaaggacacctcgtcctcgtaggccgtcgggcggcagcagggctgcgcgcgcacccgctcccgccgcaggcgccgccgctggcgcagtcgtcgcagcccgaggtcgtagacgcgcgcggcagcctcgcaggcgcctgcgcagtagcggaacagcaccgtctcgtcggacgcgtagcccaggcccagctcgctcacgcgcacctccagctcgcgcagcccgcaaggccgcgcccccaaccgcgcacgcgcgcgccgccgccggggccccgcccgacggcgcggacctgggggccgcccagcccagggcgtcagctcgcgcagctccatcgcatccggggccccctgcaggagtgcacggtctgcga

SEQ ID NO: 10902 - DNA, 722 bp, Homo sapiens
cgcctcccgcagcggtgcagcgcggccgcatcccgcactcgctgcctggtgccgtggccgcctcctcgggcagccccccgggctcggcgctggcggcagtggcgagcggcggagacctcttcccggggcagccggtgtccgaactgatcgcgcagctgctgcgcgctgagccctaccctgcggcggccggacgcttcggcgcagggggcggcgcggcgggcgcggtgctgggcatcgacaacgtgtgcgagctggcggcgcggctgctcttcagcaccgtggagtgggcgcgccacgcgcccttcttccccgagctgccggtggccgaccaggtggcgctgctgcgcctgagctggagcgagctcttcgtgctgaacgcggcgcaggcggcgctgcccctgcacacggcgccgctactggccgccgccggcctccacgccgcgcctatggccgccgagcgcgccgtggctttcatggaccaggtgcgcgccttccaggagcaggtggacaagctgggccgcctgcaggtcgactcggccgagtatggctgcctcaaggccatcgcgctcttcacgcccggtgagccacgctccgaagagggccgcgggatggggggacccaagggaggttaggaggagggcggcctggacccagactccggcccccatagcgccccgctcgctccctaggcctggggccctgcacgcgccgtgagtgaacgc

SEQ ID NO: 10903 - DNA, 858 bp, Homo sapiens
cgcccgactcaggctccgagttctcccctcgaccctccccagcctaaaggctgtacccgcttcaggccttcccagcccggccctccagttccttcttcggcctccctcagcctggggtccgggtttcctcctcggctgagcagccgggtccgcgactcccttcaccctccccggcccgggcttccggttctttccagaggtgaggcaggggccacctagaattccgcggccccccacctcccccaagaccaccctcgccccagcttcctgttccccattctgtcctcccaacctgggttcccgattactgcctcgacttcaccttgccgtcagggaccaccagccgcctcttccgcgcctaggggacgcgcagcggcagcctctgctgatggcaagggtctgcgcacccggaaactccagggtctggggcgtggtgcggcccctgcggccagcgggctccgcttgagcttcagggctctttcgttgttggactacgtttcccacaggcctcagggccgcggatgaacttcgacctttgcttccttttccggtgttgtggttattgagttaagcctggcgagtcgaggtgacccgggccgggctgcgggaggagctcgcggtgaggtggccccgcgctgccgggcgaggtcggtccacgtggagccgggagcctgaggcctctgtacgcgggagctgcggacgatggtggttagtgctattgtttacgacgtcattgtggtgtgtgtgtgtgagagacggagaccctagtgtgtgccgtgggtgctgtttgatcggactcaggacggtgagtaggggcggggtctatcgtgtgaccctggtctacggtgacgtgatcgt

SEQ ID NO: 10904 - DNA, 598 bp, Homo sapiens
cggagacacggccacacgagtaaccccagcgacgctttctccgcgcgtgtccgctccggcatcccggacactcctaccttgacagaggtgcagttcagggtccaagatctggctcccgggttccaagcccaatttcgggttcgccagcccagcaggtgcggagccaagctcctccacagacgcggccctctccccacgcgaggcctccaaatctcgcaaactaacggaaatgaagctacgctccgggagcggtgcctctgggaaatgtagtccagcgctccggacgccgtgcctctgggaaatgtagtccagcgcttggctagccggccagaacgccaggaggcccgggccgctcacccctcgaggggctcgtgggctcggcctgtggaacctgcttgtcccgcctgcagcgccccggaggtttctgggagtgcccgcccgcccgcgctcagtgcgcaggcgtcagacgctcagggcctgcgagagcgagctgagtggtcccagggtctacccctggcaggagagagggtgggacccgccggccaggcaggtgcgggggaggagctggggccggtgcggggacccgccggaacctcgg

SEQ ID NO: 10905 - DNA, 1281 bp, Homo sapiens
cgcggtgccggcgcgccagcagcccgcggccaaggccacctgctcccagggccccggcacctctgcggggaggcggcaggcagaggacgcgcgcgcagtcgcgcaggagccctcaggcgagtgggggaagcatcgcaagagacgcggacctggagcgcggtcactgcgttaccgcagcgacctgggttacctaagccggcgggactgagaggccgctgcgcgtgggcaggggctcagattgcgcccgcggtgcctgtcccggcccccaccccggaacgattgcagccctgcggggctcgccgcccacaccgcgctgaggacgctgcccaagccaggcgcccgcccccgcccgcggtctcagccgctcgcagcgcgccgcccccagacgcgcgtggctgctggcgagggctgagaccgcgctcccgccggccagttcccagcagcagcgcatcctccctgctccgcgccttcgctccggacccgcgtcgtcgcagccccgcggtgatgagccccgagccggtcccgccgccgccgccgccccagtgtcctggctgcgaccgcgcggagccgatcgcccagcgcttagaggagggcgacgaggccttccgcgcgggcgactacgagatggcagccgagctctttcgctccatgctagccgggctggcgcagccggaccgcggcctgtgcctgaggctgggggacgcgctggcccgcgccggccgcctccccgaagccctgggcgcgttccgcggcgccgcgcggctcggggcgctgcggccggaggagctggaagagctggcgggcggcctggtgcgcgccgtgggcctgcgcgaccggccgctgtccgcggagaacccgggcggcgagcccgaggcgcccggcgagggagggccggccccggagccccgcgcgccccgcgacctgctcggctgcccgcgctgccggcggctgctgcataagccggtgacgctgccctgcgggctcacagtctgcaagcgctgcgtggagccagggcccgcgcggccgcaggtgcggcgcgtgaacgtggtgctgagcggcctgctggagaagtgcttcccggccgagtgccggctgcgcaggctggcaggccaggcgcggagcctgcagcgccagcagcagccggaggccgcgctgctcaggtgcgaccaggccctggagctgggtgagtcggctgcggggcgggtccgcctcccctacacctgtccggcccagcagcggggtggggagctggccggtgggcccgaggctttgggctttcga

SEQ ID NO: 10906 - DNA, 1788 bp, Homo sapiens
cgatgcagcccggagagagcaccgcccgcgcagcgacgcgcacagaccctcccttggagacgcgctccccggcgcgtgcggccgagcccgcgtgaaatgcacagaccctccggtgaggctctgcccacgtgtgaccctgagcactgcgaagcccttcccttccatcctcgcgtggccacccaaagtcttgcctacacctcgtacgtgcagatgccaattccatagaaatacatgatgtaaggacagaaatgggaacgactggaggctgatcttctcgtgaccacgtctcgccaacgcggtgcgcccatgcacacggcgagtaaacgcacacagccggtaaacagccatccccaccatgctcagcccacagtcacgcgtggggagaaggcagcggagagggcggcggtggcaggagaagtgggaagtcgcgcgcccgcgtgggctgctccctgacagcccggcgctgccccctccccctcccgggaacggcgcccacccgggggtcgcaggcccacgcgtcgggcgcgctcgggggggctccgcagcgccgagaacgggacaatgaggacgcggtgacaggctgggtttctgccgcggtagtggcggcggcggcagctggagctgcccgtgcagcccctgccgcggccacctccaccctcgcctccccggtccccacttacgttccgagggtctctttgaactcgaagatcttcttgatgtcttcagcttgctttttccaggaggagctgctctcgccgttctcccgggccatggccgacgagcgcggcgcggaggagcggccgggggcgcgctggggagggggcgccgggggcgcggcgcgggcgcagaggcggcggggatgccgggcggctcgggctgcggcgcagcttcctcctctgcagtttcctctttcgctctcgccgccgccgccgcggccgcggtccctccctggctcttatttctgctgttctcgggcacagacttcctgccgccgccgcgcgccggctcctttgccgccgcctgccagcctcactttctgctactttcttgcctccctcccgctccctccctgccgcccgccgcgctcccccccacctcgcgcctcctccccctcctccccctcctccccctcccgcgggctccccgccctctccgtgcgccccggccgctccccgcctccagcgcgccgccttcggggatgtcccgctcccctcccaagagcgccgggccacggccgtcgtgccccctggagccccggcgagggcgggtacgggcccccggcaggtgcggggcgcacgcgggagagccccagcccctccgggagctggaaacggagcccagtctgggggcgccggggctttcccgtctccggcgggagggggcgcctctgcgtggctcggaagcgccgggcgggcgggggtgcgcggcggccggatgcggggcgccgagggcggggcgccttcccgcgctgtggcctgtggcccgggggacccgaggggcaaggcgtggggtggggggggtgggggccggttgttatggcgacgggcggcggcggcggctgggatggaggcggaggcgggcgggagctcattcgcattgcaccaaatcggtttcacgtcagtttcgggacagacccgcgaggagcaagccggggagcctctgggcgggtacgcgcaggacgcgccagcagctgcctcgtggtccctttgcgagcaaaactcccgggggtgtttggcagccgcgcgggcgccctggtgctgggctggagcggccggcgggcctggccgg

SEQ ID NO: 10907 - DNA, 626 bp, Homo sapiens
cgtgaggacctccccggcaccgcctcgcgcgggtccctgccccgtgcccaggcggaggcggggtggccactgtccttccttcccgctccgcgccctcggcggcttccccgcggccccctgcgccgcgccccctccaggaggcgtcctgaccccgcactccggcctttcacctcccgaccgtcagcctcagggccgccgcggcgacgcgcgaccccttccctctgaggggcgcgggctccggacgcgccgggctctgccaggcatctagtggagggtcggaggtcggcgaccagcccgagcccagccgtcccgggagctggcgcgagtgtcgccacgaccctccctgtcccttgcgctcgcgctgcccggccgccgggcggccgcctcagcccccttatatagccctctaaaaatagctcgcctcgcaccgccttgtaaggcagcagggagatccgcagcgtgccaatccgcgcccgccgccagggccaagccccgccccaggctctgctccgggctccccattggtcctcagtgacttcatgagccccctgtttaccttacatggtcacacgcggcctaatggacgccctcctcgagatcccacggctgcgcggagaaccgaacgg

SEQ ID NO: 10908 - DNA, 1037 bp, Homo sapiens
cgggcctgacttccgcgtcccgctagcaacagtcccccttgatttggtccaaggtctcggctctgccgcccctaaaaccgtccgtaaggtccagccgcccgtcgggcttctccgctgccctccaagtttctcccaactacttgttccagaccgcgttacctgcaacctgctccgggctggcgccatactcggcgtcccggcgcttctcacaagtgccctcgcccatgaccagcgcctgcaggggcagctcggagcccgggtggggatagcagcgcagcccctggccgcagcgcggggtgtagacgccgcacgcctcgccctccagccgggcgcacaccgagcagcagccgcagcccggctcccggacgagctccgcgcatggcatgcgggcgcctccggccactgcggccaccgcggcgggcggcgcaaccggcgggggcccgcaggcggccaggcgctcgggtgtgcagggcgggcagcggaacagcacctccgcgcgcgccccgccgccgccgccactcgcgcccagtagcagcagcagcagcggcagcagcggcggcggcggcagcggcagcgcggggcagcccactctcggcagcatgctggcggtcggcagcgcggcgcggcgggcgagcgagcgagcgggcgggcgggcaggtggcacggccctgcgagcgcgggagccgcctcctccgcttcttcctcctccctcgccgccgcagccgggtcctaaagggccggcttctccccgccccctgccttctcccctcccccttttggagaccactcccttcccccccgacactccctcgcgccggcaagtgagtgcgcgcacgcccgctcgcccacctccgcgttggctgcgggctctgggggttccctgctcttcccgggccccgtccctccgcactcttctggcctgactatgactcctgaaggagaatacggataactcgcgggtttgggtaggaccggcgtggcggtggagaagagcgcgtgcttttgtctgctctcagttcagttcgcgaggacttcgt

SEQ ID NO: 10909 - DNA, 977 bp, Homo sapiens
cggccctggcgctaatccgccggtttctggttccctggccctgtcatctctggcggggttgtgggccggtttaagattataagagggtcccggcgggaatcctcggtggtgctcgagggatccaggcaggccggcgattcccctccaacacaccccctgaagctaccgagacgctctgcacctgccgcgcctccagagcctgtcgtccccaggcctcagccctgaggctgcggtgacacctactgggcacctcgggccttgcacgcctcgcaggccggccgcaggcagtcggctctgctgccactcctccctcccggccgctggctggccctcctgccttggaggcacagagggaccgggcgctgaaaggtgtagtcctgtctgtggagggatggatacccggagctgaagacagcacaggagagaggggacctccacctaccagtgaaggcgccgccagggcgcttgcctccatgcctcctccagatttgtgataccgccgtgcggtccagatccccgggggcggctgtatgctagggagggagcacttcagggccctctgttcctaagggagagggacagcaccctcccgggcttccagctcccttgggtgtggcgggagagttctgggcgaggctgcgcctacacctgcacctcggccggctcctccggctgatttcgctctggttgatttcgcgcacattcctctcccagcgctgcaaggaccgcctgaactcgctggctatctcggtgatgaaccagtggcccggtgtgaagctgcgggtgaccgagggctgggacgaggacggccaccactcagaggagtccctgcattatgagggccgcgcggtggacatcaccacatcagaccgcgaccgcaataagtatggactgctggcgcgcttggcagtggaggccggctttgactgggtgtattacgagtcaaaggcccacgtgcattgctccgtcaagtccgg

SEQ ID NO: 10910 - DNA, 6206 bp, Homo sapiens
cgtcacgccacaccgagagaagcggagacgacactttcacccggtgggggcgggggcgaggctcccccagcgcggactcgggttcggggagtgcagggcgcactctctttgtgggtctccaagcgaaggcacagttcgggggccggggtggagggcgcgctctagcaggccgggcgcacgggcacctgcaggaggatcacctgtctgttttcggatgggtggcacttgttgatgtgccgcgtaaggccgggcgagctgtagaaggtggccgggcagtacttgcaggggaacacctgggcggcgtgcagcaggcgcaggtggcgctcctgagcgcccttgctggcgaacgactctccgcacactgggcacaggtggcactcggcggacgcactcaggcccagcacgccggccccctcgccgtcgccggccgcctcctggggcgccttctcgtcgggcccggggtacaaggccagtaggtcctcggccgggggcgctagcggcgcgcccttggcctgcagcgcctggtggtgcgccagcaggtgcttgcgtaggtaggcctggcggcggaacttcttggcgcagtgatggcactcgtagagcccgtcctcggagcccgactcggacacgccgccggggctcggcgtgtcccggtcgctgccgccgccgggtgcctcccgcgcctcagccctggctgctgcttctggctccggcgcgcgggcggcggcgggcgcgggccgcggtttgtgccagcggcggtgcgaggccaggttggccgggcagctgaagaccttggcgcactcgggacagcggtactccacacgcacgatgcgcgagcatttgtgctgcgccagcgcgaacgggtcggcgtactcctccttgcacagctggcagatgaactcgcccagcggccgcgccgcgccccccgcgcggccccgcggcgcctccaccgggccctccttgatcttgagccccagcacgggcgacgtggtcacctcgtcctcgaagtgcagcttgcggatggccttgggcttcttggcgcccggggccttgactgccttggcgggcggctccgcggcggtagggggcgggggccgctttcccgggggccgcagggcggcggcagggggcagtggggggccggggcccgggccgcgggccgcctcggcgccagccgagaacgccgtgcccatcttgagctcggcgggcgcgaagagcagcgggtcgccgccgcaggtgccgcctccgccagctccgctcgcgccgccgccgccgccccctccgagcagcgcggcgggcgtggggaaggactcggccgagaccggcgagcccaggttgaagctgcgttcgaagtacttgtgcttctcgtgctcgcggctcacgggccgcgtgggactgtagagcggcgcggggtgcgcagcctcggggttgccgaagtgcgcggcccgcgggccctgcgggggtggctgcggcccaggcgcgcaggcaagcgcggcggcgagcgctgcatgggcgcgctccgcgggcggcggcggcggcagcggcccggggaccgggctcggcgccgggggctcggcgcgggcgcccccgcagctgggcgagagcagcagtgcgcggtcgccgtcctcgccgccgcggacccggtaggaaacgggcgtggacttcttgctgcgcttcaccaggaagccgcggggcatgttggcgcggcccgagggcacggcactggctcggtcccccctccgcgctcggccccggcggccctcagtgcccccggcccattgcccgggcgcggcggctgcgggactcgcgtggcgccggcgacggctcggcccagctctgcgccctgcacgcgcgtccctgtccccgggcccggcagccgctcccttttaacggggggagggggccattgttctcgcctcccgcttcccctggagccaatcagcgcgtccgcagctcctcagcctggcagggtgggagggcgatggggcggccaaaagggggccgggactcgggggtcgcccggtaggtgcggcagatgtacctgagggcgcggggcccccgcgcgcgcccctggtcgccccgcccggcgccgccgccccgcccggtccaggcacacgcccggccccgcctcccttcacggtctgctgcttctctatggggaggcgcacgtgcctgggctttgtgtctctcctccggggggcgcggagccgccaaatgggcccgtccatcagcgcgacaatgcacgcccccctcccgcgcggggattacccgcgggtcgctagcaaaatagcaacaaaggagaagaatggccccaaatatgtcaggagggttcaatccgcgagccggagccgagggggaagttgtgcgcgctgattgggtgggggcgggggcgcgccggggcggtgcgggggagatcgttgcggaggcgcagtggctccgcgtggtgtttgggaaataaacaagaatccgagagagcagcagggtccggacggcctccgcccggaccttggacggatgggccgctggacccaagaggccaagcaaaagggttccccggggttccaagtgtggacagggggcccggccttctggcagtggccgagggcgatgtttgtgctcgcagcctccgcgcgcccacggggctagagaaggtttctttcgagtttgagaaggaattggcacggccttctcagtctcccgaaagcgcgggattggagcgcgggcgggctgggctgggttcccagaggaacgtgaatttctgaacttttgggttcttggaggcttgggaatggcatctttggcggggcccgacccaggccgcccggagcttccgcgtggtccaaggctcggttaatccgggtcgagttggccgaagcccgaaacgcgcggtcggcctcgtgcgccccagtgaagttggctttctcctccccgcgcggcctcatgcattttcattccgagcgggcattttgtttgccggttgacatcagatgctaaatcaagggctccaatcaaggcgctgcgaaataaaggggctgcctgtctgggcgcagcccccacggagccgtgcccccttcacctttgtgaaggaaattaacctcctgctattgagctccggtcgcggccaatctggacgcaaaagagacgcgtgctggacggggggagggggggcaatctgtactctgaggcaggctgaggcctccgagaggacaagccgcctcccctgtgccaccaggaagagacaacagcgaagattccccccgcccccacccccacccccacctccgctgccgttccgtttggacccagactgggccgcctgcctccatcctctgtccagcccagccccgaggaaacacaaaaggcagaatcttcgggggacagggcagagaaccccacgagtgcgtagtggccctgatcgtccaacactggggaacaaatagccaagccacataaaatgtcatatgctgtgaggaaaatgtcactttattgaaagagaaggaaacatttttctgcaaagctttgtataccagacagattttgctgagttttacttacgcttaattccactgaaggtatttaattgttttggattttccctctgaaaataccctggcgtagaaattaaacatgtaaaaatagagtccacatgagtcataagttgtgatggggacagttgttaggcttaattaattaaggggttaatcaggttggttaatcaagggaaagatatttgataattttatgtttgtaatattttaactcacacactgaaaagggaagaatgcatatagtgaaatatattttgaaaagtctcaccctagttttaaaaatgctgtggtgagtgctagtctccccaaaagttagaaatcttaaaatgagtttatctaaaatttataaacatatttctatctaaaagtaactgatgttatttccttgctcttttgagctctgattaatagtgctgatgaaattagaagtgggaaaaggattccgagacagctttggccaattttattttctaatcacgaatcccatctggattgtagaatagcatagggcgggggctcggcctgccccattcggtcttgcatatgtaacactccttccattcaacagataacagagagttagtcaccttgtgaatcctttaaaaataacaacacccataattgtaaataagccgtggggatgggaaaccggcacctctaccaacaaaaaaaacaaaacaactcctgcgtgagtgaattcaaacagggctctgaatttagccaagggaatctattaaacgctactgagatactgagattcaatgaatccgtttctttttctttatttgtggcttccagtcttgctagcgtaaatgaaatctgctttcagacgggtacagtcaaaataaatggaaacttgaaaggtactagtattggaaactaatttcaccacccggggctggaaggagttaggctgcgcacgcgcgcacgcacacaccagcgacctccaagcaggtgtagcccagcccgggccgtggatcgcagccgccttctgcgtgattttctcagaacctgtgcacccgcatgcatggggacatcgggtcgagatatttgtcttcgcctgggaagagcaaagcgccatcacagtgcgcccccgacgccggccttggcgcacgcgattcggagaatgggccgcgtgaagttaagttgggggaaacagcgcggatttgcccccctccaggggggcttcgcgaaagtcagtgaacataaggatccaaggcagagcacccaaggggccttccccggcttcaggtgactcctccccttccttcggggtcctggccagcgctttggaaaaatcccgggcctcttcactttcccttgcggaccccgcggtgggttcttcctccgacgactgcggagcccgaggccccaggccctccaatttctcctatcctggtgtgcggggatgccgtcggggagcgcgccggggttcactctgaccctcaccacggctggaaatcaaagtcaaggcaacagggagtttgtagaaagcgcgaagcttggaaataagagcagaagcggggaacttctgcggaggagttggctccttggggtgtctaggagaacaggaggccctggcctcacgggaggagccgggcgggcccgcattctcaccccgcagagggtatcgcgtttggagacgtcggcgttgggggtgaggtgtcagcgcccctcatcaccactctgctgcagacttctcttctggcttcacagaagcccccactcccggccctcagtcccccgagccacaaccggcaggaaccgtgcgttaccgctgcagtgcccgccgcccggagggaccagcgcctccctgcgccgggtgcgcccgacccgagccggtgagaggctttgtatttgcaggaatgaggggttgttgtgtcagtcccaggggcacgcgagagacacgcgcagcccgcctggccgccaccccgcccggcccggccccaggcaccttccgggcctcccgcccgcgggccgttgcctttgttcggcgcattagcataaagctgccagggatctcccgtttagataattccacacaaaaggagagtgcatgaaagagagcgaacaagggacgatccgcgaggctgcgtcgtgcgtcctcgcggggagggaccgcgctcaagtatttccctcccctcgagtttcaagtgccccctggcaatctgctgcgcgcccattattcggccgggggccgacggcgtggctggccacctcttttatccccccgagagtaccgtcggggccactgcacgctccttgaagtgccctcagggctgtttgtttttgcctcagtgggaccgtcgggccagggagggaggagagcgggtaggaaggcccgggcgggcggcgggaagggcgacgtcggcgaaagctggcagaggcgaagcccagaaggtgagaaagtcataaccaaagaattaggtcagggagagtcaggacggcacgggacccatcgggatgacattgaccttggggcgcaagaggtgtcctccacctgtgaggtgctggcggccgctagtccgtgcgcctcggtctcaaacggaactgacaaaacccagcgaaactgaccagaaaggctgcggcgaccccgatcctttccccttcctcccaccccactcacacctgcaccccgcctcgcctgccgcaggaggacga

SEQ ID NO: 10911 - DNA, 574 bp, Homo sapiens
cgccagcgccaacgaatgtggggacagttcgtctggcgcccgcggtcgcatccccatcgggcagttccgtacccctcctccgggcttccaagccgctcgccccggctgcgggagaccccggcgaatcacatccgagaggggggcgcgtggggcggagccttcctcccactgtcctcccgccaccagccgcccctgtcgccgagcccgcagtcgccagcgcgccccgagcccctccaggccagaggctcccgcaggcgatggcggacaagagggcggggaccccagaagccgcggcgcgcccgccgcccggccttgcccgggagggggacgcgcgcacggtccccgcggcccgggcccgagaagctggggggcgcgggtccctccaccccgcagcgggccccgggaccgccttcccttcccctgggcgcggggaagcggcctccacggcgactactccgagcctggaaaatggccgggtccgggacgaagccccagaaacctgtggtgcagaggggctagggactcgggcaggagccagcgagaaggccgaggacgcgaacaaggaggagggcgc

SEQ ID NO: 10912 - DNA, 3438 bp, Homo sapiens
cgtgcttgtcccgccctggccgcctgaggccggagccatacatagtctgcacagatccgagacacccggtcccgagtgatctggaaacgagtgtgctctcactgcgttcaaacaagacgaggacatttacaaggtgcgagtccccaacccccagctactggcaggggctgcgcagcggcaccgcccaggctctctctccaggcggccgactcatttctgcggagagcacgcttctcgaagagggttgtagacgcgctcttccagcatttaatttgccaccccacaagattgagttaagttttagttaaaatacactcattttattaaaaataggcggcccaataccacgccgtaccccagcctctccgagggcgcaagagaatagagagttttcagattaattggaggcaaatattttaccttctaacatttaaaaataatctaggcgcgtctgcaccggtgtggctcacgcgacccctacgcgcgaggtcagtcgggctggtccagcgcagacagcggccgggactcactcacccagtgcgcgcctctcctgcctttcgctgcgcgcgcccaaagctagaaagaagaaggtgacgcgggaggcgggtcgggtctccgggtccagcgaattcgcgatctatccggtttcggcgcctgagccgaggtctcagaaagaacccgttaattctagccatcctggatctgggtagggagggtgcgcggctcccaagcccagtctggatgcctagtgcggtgtgcttcggtctccccgtctgccctccggggaggtttctcacccggtggccctgggccgcttcactgtggcgcttccacttttggctaccggccttcctccgcccaggaccttccggcccagggagcagccgacgggcacccccgaacgctggggcacggaatttcaacggggcgaccagagcggagctcgcggctcgaggctcgcggctgagtacgaagacgggacccgaggacctgtacatcgctcgaggggaacctgtcctgggctctggtgcacacatagtatgcgttctgggctggcttgggttgggccaggtaggggagacctggctgggtacgaggcgccgtccaagccttccggccgtgggccgggcggtcgcggcgcctttgcgcacagtggccacttggggtcgcactttatgcctgtttgagcctctccgcggcgggctgacgccgggatctgcttaatcgttacaaaacgttcaaacaaaaacagggccggctccccagcagtggagagctactcggagcaccgtcccgggccggcctcggccccgaggctccgggggctcaggattccgtgcgtgtggcggggaagaggaattcagagcctttgggctgctgcttttcccgtcgccttcactgtgaacattgtgcggtggggtgaacgcggggagcggcggggccagtggagtcgaacctcagggctctgcgactgcacccgccaggaggggccctcgcttggcctgagaaaggtcccctgaggttaagagttgggtctgaacacaactctcggagcctcgagcccgccctccccaacatacaaatacgcgcagatctccagaaacaggaacgcacgacacacacggccagaagccgcgaggacacacagagcgtcgcccactgggcgggggccgcttgggaacaaagggcccaggaggcgttgtcccggcgctcattctgagcctccttgggggtgacacgggatgggggtggggtgcaaagggaactgagggaggagagtgcgcgaggaggggaaagcggtgatttggcctagaggtggggcgcgcactccaggcgagcgtgcgtgggccgggacctgcagggtacgggggtgggcccaggctggccgtcccactccgctccagcgctccgccaggcctccgccgctccggggccgctcgggccgccagtcagctgacgcggggggcgggggagctgtcaggcgcgccccgccctgcgccgctgggccgcggaggccgtgcagctattggcccgcgcaccgggccgcccgggcccccgcaccccagtgacatcaggaggcgataaaaggctgcggcgccgccggatccagcacagctgcaccgccgagctgcgagcggctgcgagcgagagagcgtaagagcaagagagctagagagcgagcaacgggcactcgccccacgcctcccctcagccccaccgcgcgctccgcttgcctctccaccccgcccgactctacccggcccggtccctgcgcgggcacagcccagagctctggggcggtgcaggcagcctcgggactctccggcgcgccgccgcgtccccagacaaaggcttggccggcggccccggcccgctgcgccctcgctccccgcctccccagctcttctccgctcttcccccccgcgcttggctcggcgcgctccggccggccgcaaagtttcccgggcggcagcggcggctgcgcctcgcttcagcgatggccgcggagctgagcatggggccagagctgcccaccagcccgctggccatggagtatgtcaacgacttcgacctgctcaagttcgacgtgaagaaggagccactggggcgcgcggagcgtccgggcaggccctgcacacgcctgcagccagccggctcggtgtcctccacaccgctcagcactccgtgtagctccgtgccctcgtcgcccagcttcagcccgaccgaacagaagacacacctcgaggatctgtactggatggcgagcaactaccagcagatgaaccccgaggcgctcaacctgacgcccgaggacgcggtggaagcgctcatcggctcgcacccagtgccacagccgctgcaaagcttcgacagctttcgcggcgctcaccaccaccaccatcaccaccaccctcacccgcaccacgcgtacccgggcgccggcgtggcccacgacgagctgggcccgcacgctcacccgcaccatcaccatcatcaccaagcgtcgccgccgccgtccagcgccgctagcccggcgcaacagctgcccactagccaccccgggcccgggccgcacgcgacggcctcggcgacggcggcgggcggcaacggcagcgtggaggaccgcttctccgacgaccagctcgtgtccatgtccgtgcgcgagctgaaccgccacctgcggggcttcaccaaggacgaggtgatccgcctgaagcagaagcggcggaccctgaagaaccggggctacgcccagtcttgcaggtataaacgcgtccagcagaagcaccacctggagaatgagaagacgcagctcattcagcaggtggagcagcttaagcaggaggtgtcccggctggcccgcgagagagacgcctacaaggtcaagtgcgagaaactcgccaactccggcttcagggaggcgggctccaccagcga

SEQ ID NO: 10913 - DNA, 4088 bp, Homo sapiens
cggcccggcctggcccgggacacgtctgctccgcgcacacacagtcagtcggtcctgcccgaaacgcaccaagtcgcgcccagcggcaaccgccctccctcctcccctcgccgcccccctcccgactccggcgccacgactcccttgcgccccctcccccccactgcaccacctttaccgctccgatcctttccgaggggctgatgtcaccagcccccccactctcctcggccacttctccccgccaaagcctccctttggcgaggccccctccgccaccacggcgccccccagcgtcaccccctcctctcctcgcccctttcttcccctctttccctctcccaacaaatctcacaccccacggaggcgggtccccctccctctacccgccacccggtttcctgtccccgaaaccctctttttgtcgcagtctccggagccccatgggctccccctccccctccccaacacgcacccaaacccctggcgtcgtgtaggcctcgcggaaaaagagagaaagagagaaagagggggagagcgagagcgagagcaagagagagacactgagcgggcaggccgggggagggggacccgcgcccgcgtcgccacggccccccgccccgtttttgagcccccgcccggccgaatccgcgcccctgggtcccccttccggcctcgccccccacagacagagcccgcgaacgggcggggggctcgggagcgcgcgcccggggcggggggcgggctcggcgcgcgcggcctgcggggcgcccttcgagggcccccgggccggggccggcgccccccgcccgcccttacccagcagcagcaggcggtgcgtggcccggtagacctgcttgtccttctgcagctgcttctcgatctttttgttggcctcacgctgcgccttctcctcgttgcgctggtcctcggtcttactgttcccgaggcagcccatggcggcggcggcggcggcggggcgcggccgggctgcggcggcggcgggcgcgggcggcctcacgcgggccgggagggccggggcagcgccgggcgggcgggccgggcgcgggctcggctcctcggcaaggagcgcgcggggcggactgcgggccgcgggccgcggggcgcgcggacgggcgggaaggggagggtgtcggtcggaccgaggggcgcgcgcagctccccgcccctcgagccgaggccgagggggctgatggccgccgccgggccgaggcggaccagagcaggagctgcgggagctgctgccgccgctgccgccgccgccgctcttattgcctcggccgggcccccgccgccgccccgagccaaaagcgccgcggcgggcggggggaggcggggggaggaggaggcggcggcggcgaggggggtggaaggaggaggaggaggaggagggccgaggagcggccgcggcggcggcggcggctgggagggcgggagccggcggagggaggcggccccccgggagcccggggagggggtccctccgcccgcgcccggccggggacgggacgggccggggagacgccccccaccccccgggctcgggcagcagcccggctgagccgaggggggagagggggcgtctccgcgccagtgacgacccctcgcacgacgccaacgctccaccccccggaccgcgtcgcccggcgcccccgaggcctcctccccctcccgcgggcgccgccgaggggctggggtgggcggaaggggagggagcgcgcgcccggacttaggaaaattttcgaaagagcgagagacacagagagccagagagcaggagtgtggaaaaagcgaggcgagcacgaaccaaaggacagagcaaccgaaaaggaaaatgtgtccacacacacacacgaacacgaataaaaacccacactacacagcgatggtggtgtctggtggcggtggcggggtggggggtctgactagatgagccgctcctcgcgcccccggcgccgggcgccatggcccgagccgaaggcgcctctggccccggagcgcccgcggcctctgcgcttggcgcggccgcccaagtaggagaagaaggcgcagcccaggaacactcggaagcagcaggtcgccccgaacacgaagccgcagccgcggccctgctccgtgcgcttctgcagcaggaagttgagcacccacgaggggctgcgcaccgagaagaccaggaacaccacgaggggcaggtgggcgctcagcgcgccagccttgagcggcccgggccgccacacgatgcccccaacgcgcggcgccgcgtagtaggcgtcgtcctcgtcgctcgagtccgtgtcccagtcagcccaggccctactcgtgcccccggcggcggcgccctcctcggcgcccccgacggcgccctcctcggcgccctcgtcgtcgtcggcggcggccgcggcggcggcggcctcggggcatcgggcctcctcctgggcttctggcaccttcttcttcttcttcttcagcatcttctccatcttcttcctctccttctccttcttcttctcctcctttcgcctctgctccagcagcttcttctcgagcttcttgcgctccttgtctgttaggaacttttcggggagcgcctcccgcgccgggttcttggggttcttcgcgagcttctcggggtccccgctcttccgcggcgcgagcggctctctcggctcggccaacgccgcagccgccgccgcagcttcggcagccacctcggcagccgccgcggccgtcttcttctcgctctccgccgcccgggctttgagcttcatggccatcttcagcatggtggcccggccacctcggggagctcggctcgcgcctggcccgggctccctgcttgcccccggcctcgggctgcccggcccccgtgcgccccgtgtcggggggcttggctgcggttcccgccgcgctgccccggggccgcggagcgcggctgcccgggcttcgggctgctgggctggctgcctaagagttagcgccaaaaaggatgagcaaacgaaaaagggacaagaacaaaccaaaaagcacccaacaacagcgagaaaccaaaaagcaccaagaaatgtcaactcaaaaagaaaagtgcaaaggcgcggatggcaggagtctgtttaccctcaggcgctccttggtttggctcttgggcacgccaatggagaagagaaaagagagagaattggggggtgcccggaggcgccccggggcaaggcagcggcgcccgggcgcccctgccttgtcccggacccggcggctcttgcctgcgccgggcgactcgcacttccgcgggaggccccggcgctccccgacttacatgtgagtgaggtgcactcacacgcaaggcagcgcctgccggccgcccgccgccgccccgcgccgggacaggggctcgctccagccgccgcgccgcagcccggagccagagagcaggggagcgccgcgccggccagccacctgacgcagcccgctccgcggtgccgacgcgactgagtgtccccgccggggagcagagcttctaaccggccccgatgacgccccagcctcttcagaggaccgacccatagcagcggcccctataaaccgaaggggaagcgcgaaaaatcggcccaccggggacgcacccaaatgggccgccgcgcaccctgggggtgcaggccggtgccgggaccgcgcgggcgtgggccgggggcgcgggggccgcgatggcggggggcgcgggcgcgcccaaggcggtgggcgctcaaccccgcctcccagacctgcctcccaattttcggtgagtggtgtagccctgggcggcgtgcaaagtgtgcgacggcggcgcttacccctgctgtgcgcctccttacctccagccacccaccccgccctcccagcggcgcgcgcccgccgaggtaggtgtcagagagccgaattcgaattatttgcgacgcccggacggagtttcgtatcttcggacgagaaaagtgcgatgggagtgcaaagcctcccctgctcgaagcagcaggcgcgccggtgtcacgggagccgaggagcggtggccgtggctgtggagtcggtgctcgaggcgt

SEQ ID NO: 10914 - DNA, 522 bp, Homo sapiens
cgatacagcccccggcgcgccgggcactgaggccctggagcacagcgtggggggcctggcacagacacgactcacgaccgggccgatctccggccagaaagaactatgttccggccgcccgggtcgcgggcccgcggtgcatccctgcaggcctccatcctgcctcggcagaggtctgcaagaatcctgtgggtgtcccccggagcgggcagaggaggagcccagcgccgaggcccaggcgcgccccgccctcgcccctccccgtgcccctcccccgctgctcccctcccaaaggccgagacctggacgctgcccggtggcctcggcgggggccctgtccttggccgctgcctctctgaatcccaggtgagaagaataaaacgtcctgacgctgtccggcttccggttcttggagaggacgggccgtctctgccgagagaactgtgcggaatcaggaagcgctggtgctccttcgctttcacgggactaagcgaaatccggctttaaacgaagtaaagccgg

SEQ ID NO: 10915 - DNA, 2260 bp, Homo sapiens
cggcatccgggccgaagcgcctggtccgcgtttccgcgcgggctcccctggaaccgtcccgggacacgcggccctctcgctgctggacttttccccgagccccagcttgccaggcagggactccctgggcgggcggcggggaagcgccgagtcggcggccgcccacacccctctccacgcagcacaaaggacactcgccggcaaactttcctcgcttctgacccgggccgagccgggaactcagcgccagctctgttcctggcggggctgaggcttccctcacattccaggccacctggcaaacgtcctgaggctgccactccttctgggctcaaggctcacgggctgaggtctgtccccgcgtggagctcaaggctcacgggctgaggtctgtccccgcgtggagctcaaggctcacgggctgaggtctgtccccgcgtggagctcaaggctcacgggctgaggtctgtccccgcgtggagctcaaggctcacgggctgaggtctgtccccgcgtggagctcaaggctcacgggctgaggtctgtccccgcgtggaccgccgagagttcggtagatccttcccaaggctctgacttcaatactttcagtgccttgtcaattataccccttgcccctttctcttaccaaggccaccgccaagacaccctttttctttcctctccccgtcgcccgccaccttccttgccctcctcttggccctctttccagctccctgggccccctttccgcgctgctctccagccccagctgccttccccggttcacatcccggcagccctcctccctccccgtccccgggcacctccctcccctggtcggcccctgaaatccagcaggctcggctccggtcactgcctttttttgcctgtttctatctggcctgccttcccaactatcgctctcccacacctttttttttttttttttggcaagggggacggggggaaacggggcactatattctcgtttcccgacttcgtcattttccccagctccgtgagccgcgccccctcgtccccctcaggcccgcgatcttaccctgaggttccccagaccccgtagggtctcccacgccaccaagtttgcctcgacttcccctcgctgcctcccacacctcctgccgcggcgcggccggccagggacttaccccgaggcccagctggtgggggtgttggggtgcgcgcggacccggcacccacggcggcggcggcggcagcagcagcaggaggaggagaaagacgaggaggaggaggaggactagctgagcggcgcctccttcccagcccgcagcgcgcactggctccttggggcacccccgggagagcaccaagaccggagactaggcggcgacacaggcaaccgctgctgcacggggctgggctcagtcggctctcagaggccagggcagggggaggcaggactgggaaggagggtcggagaagtggggtgcagagggcggggcagcgagcggccaggtccggaggaaggcgccccaggcgcctagggatgccgccgcccgggctgacgccgtcggcccctctccccgccaggcgggcgcttgcagccgcgggcgcacgggcctcgcctcgttcaccggctcgttgccggcgcccgcggtgcgccccgctttgtgctccccgcagccggcgtgcacctggtgtaagcaaaggcggtcagctgatgggccgcgcgcggattggctgctccgccgtctcctcccctcccgcccgaccctcttcgcggcctcccgcccccgccctcggcgcggccccgtgctgggcaccatctgtggaccgcccaacaaaggcgcagcgcggcggggctcgggtggccgggccgcggtcgccgctttttgtctaggggacggcaggctgcggctgggcagggaggcgaagcgcactgccggtttttagcaaaagacagaccaaaagaaaatacacgtccgtgctaggaggccagctaggcacaatggggccccatctctttgcggcgtagaactcgggctcgggggctgagaaccagacacagttcggcctggggctgtgggagccaagtttcggggtgaaatccgaccctgcgtcttaaaatacagggcgcgtcctcgggctgtgtgtgcgcgcccgggggcgtcctccgcagacctggcccgggccggtgtccctgccgcgggaaggaggattcggacgcttaactcagcggcgaagtcgcttcccattggaggaggctttccgaaaacgt

SEQ ID NO: 10916 - DNA, 1502 bp, Homo sapiens
cgacggtgagcgtggagcagcccgcggtctcgctgcccccttcactcccggacccccagcctccccagagtggaggggcaagcacacagtaagtacttgatattcgcccgactcctgagctcctcatctgtaggagctagggggcttgttctccgtacgtcctttgttggagggaggaacgagggaaggagaaaacccacgctgaggccgttggccgatcactttctttacctcccggacaacattgatgggccccactaaggaaagccgaattctcgcatgcccgaggagtgtcggaggtggttgtgcgcctagtccctcctggtaaagggttcgaagcactcgtttattcaaaggcggccgagagccataccatttgcttgcatgacgggagacaccgaaacgccccttttgaacgcgatgacaaacacctcctcccactcagcagcgacgtgcacgtgacagtttttgggctctcgcaactacgtggaaacttggaataggtctgcggctgcacaccgcccggacgccggggttcctgcgtcccccgccccctctgatcgcggctgggtagccgagccgcaggcagctgggggcccccgaacgccgcctctgcatcgcgccgcccctgccccgggctccggtagctttcgggcttccgcactgcccgccgcgccctgcccacagggaagcgcttccccaggcggcggcggtcctggtgcggaccctccggccgcagccatgtgggacccgcgggcagctaggtgcgtagcggcgcgggaagcactggggcatctctggccttccgggcccgccacccttcctggcgggaggcggccgcgcgcggggactggcgaccctgaggtagcggccgaacgggcccgcccggccatccctgtggggcccacagccatctaggtgcagacccgagccagttgcgcggggtcggtcgcgggggacggcttcggccttttcggtccggagggaccagggcacgcgctgcgacaggactgcggcggcgcgcggcctgcctagctcccaccccggcatcgaagccgcagctctcgggcccacctccgcatcctcaggggttcccgggggctgccgacaggttcctgaccagcgagcgcgcccccggggcaagcattcttggcgggcagaaacctgggagcggagcacagcggtgcaagggaaccgtgccaggcgggaagggcggaatttgcggggaacttggagcgcgctggcctcttcccggcagtaggaggccttcttccctgcccgcccgattgagggctgctgggctggctcaaactggactgcacggtccatcagcctgggctcaccgagtctagggggaaggtagtagtagggacccaaggctgggaagcggagcccttagaagcccttgcttctgcctcggagcgtttccgaaccggagctcggagtctgttgcctgggaggcgcgttgcgtttcctcccaactccctgtctccgtcccgcgg

SEQ ID NO: 10917 - DNA, 510 bp, Homo sapiens
cgtcccttgtcgggagtcactcgtcagcttctcttctcagcccggctgcgcagcgctctcaacccaacccctggactcatcttcgccccagcctccttcgtgcccagcgtcccttgtaaatgacccccccggccgggtgccccgctttctctctcggcctcttccgcgtggtctgctctccgcccgcctgcgctcgcccggcctccctgcctctgcgccttcacctgaccgcaaaggcggccagggcagcctccgcgcggcctgacagtcacggctcccagtttgtccctggacgtgggaaactcgggctcatagcgcctctacgtacactgcggcacagactggcgtttcctacggcgccttcactggaaagcgcccctgtggtcctggggagagggcggctccatccgccacccttcccggagctgcccccgcccattctcatgggaggaaatcgcagggcgtgtgagcccccgacccctcgcccccacctcttccaggaccggccgc

SEQ ID NO: 10918 - DNA, 940 bp, Homo sapiens
cgggcaactgcccgggccttgcccacccctcccgcgggccgcacctgccaaggccgcaccgccagcgccccctgccgccctctctgcacagagacccgcgcccacccccgcacccgcacccgcacccgcacctgcccccaccccgcgctcgccccgcgccgaggccgcgcagcctgcgggcagtggcgggggcacgaggatgcgaatccaggcggggccgggagctgggcgcgtcccccagaacccccgccacggccaggcctgagcctcacctacctacgccgtatttctcctcctccgtgggggtccacatggccgtgccgggcgcggccccgcgggcgcggcgaccgggcgacaacgcggcggggacggccgcgggcccggctgtggcgcaccgcgagtcgaggcggggacggtcaggcggcgcggggcagtgggcggcgcatccctcacaggccgtccgggatgccgccgccacccccgccacgtctggaccgcgaggctccgcgggtggcccagcagcccctggcggcgcgggcgaaggctcgccacctgtccgtcgccgctgctcccgtgccgccgcttgcttcttcacagctccgccgcccggctcccggcgccgccgcggctcggctcgccccagcgggctcgcaggacgcccgcgcatgcgccactccctgccgcgcaggggctcgcgctgcccgggctcgcgccgtcccgagcccgcgcgcgaatccacgcgccgctgctgcgcgccagcggagggaaatccgcgagaagctattggactgcccggccccggaccggcttctagaatcgctggtccggggccctcagctgcagcaaaccccggagggggcgaagccggtcaggtgggcgactccctctacccggactccccactcgcttccgcttccagtgcctcctgcctgcgccccga

SEQ ID NO: 10919 - DNA, 2718 bp, Homo sapiens
cgtccgggccgccccttctgcccagccccgagcgcggagctgtccaggattcccagacgggtgcgagtcactgcctgaagccccttctcctccgtcggaagaggatgtgcttaaaggatcgccggaaatcctggttgaagaccgtgtagatgaccgggttgagcgagctgttgcagtagccgatccagaagaagaacttgaagagcgggccgggcacctggcaggcctcgcggcagatgccgtacaggctgtagctgaagaagaaggggaaccagcagagcacgaacacgcccatgaccacagccagcacaaaggtgaagcgcttctcgcgcgcctgggccaccttgcggcggcacacgctgctgcgcgcccggcgccggcgcgacaggaagaactcgacggagcgcgagctggcgcgcgacaggcggccaccgggccccggggacctggaggcggtcagcgcccccgactcagccgcccccggccccgccccctgcccgtccgcaccgcccgcgcccccctccgcgcccgctcgccgccgcccgccccgccgcaacgcgccccggcgccgccgcctctcggccgctgcgctgctctcgtccggctccacgtcggcgggcgggggcgcgcagtgcccgttctcgcctgcgcctgccgccgcgcccagcccgttttcggtagtcggggacgcaccgtcggggcccacgggggcgcgcttctcgctgagcgtgcgcgtgcgcagcttggccactcggtagatgcgcgcgtagaccaggcccatgatgaggcagggcgcgaagaaggagccgatgcaggaggacaggatgtaccaggtctcgtcgttgaggccgcactgcgggtaggcggcgccgtcgggctggcggtagagcgagaccagcggcgggaaggagatgacggccgagatgagccacacggccacgatggtggccttgacgcggcgtggtgtgcgcttcaggttgtactcgacggcctgcgtcaccgaccagtagcggtccaggctgatggcacacagatgcacgatcgacgaggtgcaaaacagcacatcgagcgccaggtacacgccgcaccacacctgcccgaagtaccagtaggccatgagctcgttggccaacgagaagggcatgaccagcgtggccaccaggatgtcggccgaggccagcgacaccaggaagaggttctgtggcgcgcgcagcgcccggctggtcagcacggcgatcaccaccagcacgttgcccaccacggtgaagacgatgaggaagcccaccacggcagccagccctgccaccgcgcccgccgagtactggccgcgcggcggcccccaggaagcccccgaggcattggcaaccccgccgctgcccctctcgcccgcgccgctcgcattggggcccgccgctgccgccaccgccagcgccgccgccagcgccggggacgccatggtcctcccgcgagctacgccgtccctcctggagccggggcgcagccgcggcagctcgggcgccccccagccggggtcggcgcccgcatcgccgcctgctgctcgggcgcgcccgccggggaccgcggcgcccagcagccggccctcggccgtggtggctccgcgggcggcgcgccggagagcgtggctgccgggctccccgcagctgccgagcgtgtaagtgcagagcaggaggcgcccggagcgagcggcgacgcggctgcggggggaggggggcaggtcccggggtcctcgcgcggccccgccctcggcccggctcacggggagcgccccggcgtcgagcccacggcgacgcggcgcccgagcgggcgtgcctgagcggccccgcggtcccggagcccagccggggcgcaggcgacaggcggcggcggcccgggcgctccgcctcccatccggccggctagggctcggcgcgccggggcgccggccgccgctcctccgggcccccgcgcccgcgcgctccctccgtctccaactttactttcccgggcggggcgccggcgccgccgcgagtcctccggctgctcccgggcgcgggcgccccccgcggtccacgcttggccgtgcggccgccgcctcgctcgccggagctgcgccgccgccgccgccgccgccctgcgctgggcgcgagtgcggccgcctgcgatcggcttccaacttgggtcgagttgcgcagcggggcgggcgcgcggggcggggcgggccgcgggccctggggagctggccgggaaccggagcccgcggccgcctggtcgaacctgcccgcgcggcgccggggaggagtccggggcggcggcgcggggcgcgcgctcggcgagggcgccccctccagggccgcctgcagcctgcgggacggggccgagcggcggccggcctgggtggtgagttccagaagctgctctttctaagactggagcctccttcgcctcccccggcgcaggcatgggcgcaggcgggggcgcgcacacgcgcgcgcgcagcacgggcggctcggggtccatggcctgatggcagagcaacctctcgcagcctgggggaggacgcgacgctacctgcgtgcgcacaggtcctgccgagctcagggtccggaccagatcctggatcggcgctccccgtcagagccacctccgcacccaccccggcctcagttccctcggcccacttcccagcgctgctggagcatgaatcataactaacggcgg

SEQ ID NO: 10920 - DNA, 2661 bp, Homo sapiens
cgcgggcaaagcgtgcctttcggtgggttataagcagcgcccggtccttccttctctcgccaagttgcctgatccttccctccaggcgcgcgcgcacacaccacactcacacaccccaaaaccaagactcgtcctacaggatctgggaaaagaaaaagaaaaaaaagccctcaatcaccacctccttctcgccgactccccctcaccccccgcctcccctccagcgggcagccaaggagagctagaggcgggggaggggagagggaggagaagcgacgcaagtgggtagcttttcagcgccggcgaggcgcgggaggaggagaagcagtggggaggcgcagccgctcacctgcggggcagggcgcggaggagggacccgggctgcgcgctctcgggccgaggaaccaggacgcgcccggagcctcgcacgcggccaagctcggggcgtcccctcccctcggccgggcgaactcaaggggcgcagctctttgctttgacagagctggccggcggaggcgtgcagagcggcgagccggcgagccaggctgagaaactcgagccgggaacaaagaggggtcggactgagtgtgtgtgtcggctcgagctccgggcagaggcatttgggcccgaggcccccgctgtgactccccgagactccgcagtgccctccactgcggagtccccgcgcttgccggcaaaaactttattcttggcaaacttctctttctcttcccctcctcctcggcccccatcttctgctcctcctccttctctagcagattaaatgagcctcgagaagaaaaaccgaagcgaaagggaagaaaataagaagatctaaaacggacatctccagcgtgggtggctcctttttctttttctttttttcccacccttcaggaagtggacgtttcgttatcttctgatccttgcaccttcttttggggcaaacggggcccttctgcccagatcccctctcttttctcggaaaacaaactactaagtcggcatccggggtaactacagtggagagggtttccgcggagacgcgccgccggaccctcctctgcactttggggaggcgtgctccctccagaaccggcgttctccgcgcgcaaatcccggcgacgcggggtcgcggggtggccgccggggcagcctcgtctagcgcgcgccgcgcagacgcccccggagtcgccagctaccgcagccctcgccgcccagtgcccttcggcctcgggggcgggcgcctgcgtcggtctccgcgaagcgggaaagcgcggcggccgccgggattcgggcgccgcggcagctgctccggctgccggccggcggccccgcgctcgcccgccccgcttccgcccgctgtcctgctgcacgaacccttccaactctcctttcctcccccacccttgagttacccctctgtctttcctgctgttgcgcgggtgctcccacagcggagcggagattacagagccgccgggatgccccaactctccggaggaggtggcggcggcgggggggacccggaactctgcgccacggacgagatgatccccttcaaggacgagggcgatcctcagaaggaaaagatcttcgccgagatcagtcatcccgaagaggaaggcgatttagctgacatcaagtcttccttggtgaacgagtctgaaatcatcccggccagcaacggacacgaggtgagcgggccgctgccccagttccgagaggcgtggcgggtccctgggaaactcagagagggaggaagggaacgaaggcgcccggccgcccggctgagggtcccgagtagatccctcgtttgttttggggtgtgtgcgtagctgggcccccggtccgcagtgtgtgtgtgtgtgtgtgtgtgtgtgtgtgtgtgtgtgtgtgtaggatgggaggtagaggggcagggtaacttattccaaatggatcagtttagggggttcggtggctgaacggttggttcgcgggcaggaacccacaatgtttcgccttcggtctttttgttgggctgaggggtgccgtgctttaaagcgagtagggctgaataacgctactgataaattcttccgtgggacggaaaacaaagtgcacacgctatctcttggtagatgtctctgcaaaagtgcgttaaaccaccaaaggcttaggtggagacgagcagagccacaggcgggaggaaggggaggcgggcgtgggctggggcaggcggggccgtccctaccaccggtgagccgggccgcggggagcaggccggccgatggggcgcgcacccgggctgcgggggcggtgcggggttcagtccctgcggccccagcgcctgggctagcagctgggagctgtgggtgcgccgagccgacccaccgcaagggtacaccctggctgtaccgcccccaactctagttttctccaaccgccatcacttggaaacaaacccacaacttttatttggggtttgggaccggatcaggccttaaatctacgcagaagaaaggcggagaagcagcggaagccgggcactagtcctgcagggtggaaggcgctttatcgggtcttctggcccgctgcgggcgatagagctggtaacctgagtagagtaaatagagacacgtgggtgctggctagagaaagcgcggagcagggccgcgc

SEQ ID NO: 10921 - DNA, 801 bp, Homo sapiens
cggttattaagcggctcccccgtgagccccgcccaatgcctgtgcgctcaaactagcagcgtccgaggaacgcgttaactgggagaagtgaactgagggggtccggcggccgctgaggaggggagcgcgcgggaggaggggcgaggagcccggaggcgggcgcggctggcagcttagagggcccgggcggaggcctgagagcagggctggaggggcggaggaccggggagacccgcccgcggcgttcccggccggttctgagcaggcgccgtggcagcgcccgcgccccctgcccgccctccgccgtcgccaggacgcaggctcgcgtcagggctggcggtagggcccgcagctgtcggcctggcgtcttcaccccgcgcagtcggcctcgcctagccttctcgcgcctgactggccggaccctgcccctggcggaggtaactgcccgcggattccttaccccgcgatcctggcctcctcgtaagctccccggacccgggcgtcctcggtctcccctcatctactcttctgtcgggcaggtccgcgaccttccgcctcccgggccgtctcccgccgcacccggccctggtacatccccactacccagtccgggcccgtcctcgctctgggcctaccccagcctcccagcgtcgcctgctgacggagcgcgggagccccaaggggccggggtcacccggccggcgtgggtggtgccaggctcgggccacacctcggcaccggacccgagtcccccagcttctcgagcaggatccggaggaatagaacgtcaattttcctcgc

SEQ ID NO: 10922 - DNA, 311 bp, Homo sapiens
cggctaacggtattacggaagtactagttggcacagaggctcggtgcaattaccgttctgcaccgtaaaacgggtttaggaagttcctaggagatactagcggtgccagaaccgagaaagtgacgacacagacaacttatggactccgcgtacgggaaacgttccgttgggcgctaagaacggtgcagcaactgaaaaaccgctcagtgggcgctactggcaaaagcgttgctgcaaaaccgccagctccgcattagaagcagagccgccagacagaacccgggacctgaaaccaccgaagcggagaccga

SEQ ID NO: 10923 - DNA, 1048 bp, Homo sapiens
cgtcctcgcaaatctcccgggctccacgccctgcggctatcacgcctgacagagaaacaaccagcaccagcggctgacccggctgcccgggccctcgtgcaggcgggcgggagcggacaggccctggcacgcatgcgctcggggcgggactgcgccttaggcctgcgcgttgccgctagaccagcgggggggcggggcggcggcggacacgcgcctcaggcggcagccgcgcgagagggactttgtgttccgctgaccctcctcggggcgcttcctcccgtgccgcccttcccctcccccgccgcgtccttgcgaggcgcctcccattcggtgggaccgacccggggggatggagggggcacgcttctacaaccctcctgggaccccgaagagacgcccgcgtgcgacctgagacgccgccctcgccgagggcccatgggcgcgtccccacaggcgggcagtggacgtgagggcggcgagcggcggggccgcggcgtccaggagggccgcgctcgggctcggccccgcgcaggccgcgcgcgcgcgctcccgccgccgcccgggccgcgcccgccccgcctctaggcgccggccccggagcccggtccgcgagcagcggcggctgccggagggacgatgagctgcgcggggcgggcgggccctgcccggctcgccgcgctcgccctgctgacctgcagcctgtggccggcacgggcagacaacgcgagccaggagtactacacggcgctcatcaacgtgacggtgcaggagcccggccgcggcgccccgctcacgtttcgcatcgaccgcgggcgctacgggcttgactcccccaaggccgaggtccgcggccaggtgctggcgccgctgcccctccacggaggtgagtgccggcccgggggcggcgggcggtggtcgctgcatcccgcgtaggcggcgggactagggttcccggccccggctctggccctggctctcccgcgctgcccggccgacagccccagccagggtcgaggcttccgtcgtggacagcccggcctgctcccgt

SEQ ID NO: 10924 - DNA, 301 bp, Homo sapiens
cgggaagcagcaggcgcacggccgtctggatctccctggaggtgatggtcgagcgcttgttgtaatgcgccaggcgggaagcctcgccggcgatgcgctcgaagatgtcgttgacaaaggaattcatgatccccatggctttagaggagatgccggtgtcggggtggacctgtttcagcaccttgtacacgtatacggagtagctctccttgcggctgcgcttgcgcttcttgccgtccttcttctgcgccttggtcacggccttcttggagcccttcttcggggcgggagcggatttcgc

SEQ ID NO: 10925 - DNA, 1395 bp, Homo sapiens
cggccctgtgaggcccacgcgggagcgcggaggctcctgggtctcagggcgccggcagatggcctgcagcgcaccgcccggcccccgcgctggccacgtccgccagcgtcatctctctcccccgcctcctacccctaaaaatccggcggtcgagtagctccgcatcccggagggctcccggtgcaaaactgagtgggaaagagaaaggggcggagagcgacgagagagggaaggtggggaagaagagcccggccgcccccggccttttccggcgagctctgagtttccagggctcatccgcccctccaagtcgaattacagaaactcctcattgccatgctaatgacgagaggggctgtggggagagggtttcgaagaccctcctggaagaagggaagtttcttttcttgccctcgtctccttcacgcccacccgagttcctcccagccagccctctgcgctcttccccctccattccgagcttgaagagccggtggcccagcctcgccctccaccacggttctatgcgctcctcacagccccacggtctcccagcccagcctcagaacagaggaggtggcctgggaacccggggcgcggtgtcagccggattccccgccttccggctgggcgcgctgcgggctgggccggcgtacttgcggccacccggcgagctctggcccactgattcccgccccgagagagccgggagccctcttcccttctcacctctcgccagttcatctttcattgaacggtggggagggggcgggagcgggggacgcctcccagcccccacctcccggaggcctggcggggcgggcagcggagtcgggcgcgcgcagaacgcagcttttgctcttcttcgctccagcactccaaatcggcctttgcagtcgccgcagcagctgccgccgcctaggctgcctgggggggcgactgcgcgtcacctagacggcggagcgccggggatttaaatgccactaaaacggtgatccatcactgcggaagccggcaaacttttgcaggaggctcagccattggctgacaccgtcacgtgcccctcctccagcgtcctccgccctcccgccccccctcttgcgcactgtacattcatatcatttttcttctccggccccatggaggaagtgagaaagttggcacagtcacgccgggcttcgcaggaccaggtcactcagtgacagatggacaatgcaagaatgaactccttcctggaataccccatacttagcagtggcgactcggggacctgctcagcccgagcctacccctcggaccataggattacaactttccagtcgtgcgcggtcagcgccaacagttgcggcggcgacgaccgcttcctagtgggcaggggggtgcagatcggttcgc

SEQ ID NO: 10926 - DNA, 766 bp, Homo sapiens
cgaccccgtcttatgtcggtcgcaccgtgtccctcccaggctccactagcacctgggctgctatggtgagatcaagatgggccccgcccacaactaacgatgttattccgcagcgagtcaaagccactccctaccctgggcccgctacgcgacctctgccggcctccgccccacgcggttttagtacggcgccaaggccccgcccacaaatcggccccgtcccctcgtgtccgggcccgccgctcatcagacgccgttccggcgcagcgagttgagggcacgcctaccctccctccgggtccccagtcctcaaggtcccagcacaatgccccaggaggaagactccaggccccttcctcacccgacgctgtttctgggcgagccgaggccccgcccacccgccggcccggctcccgctctcacctgacgctgttcttgtgcagcgagtctaggcccgcgcccgcagccgtgccaccctcggagctcgccttcttgtccaggttctggaagcgctcgcgggccgtcaagccacgctgcgagctctgcttaggaacgtccagccgcccgccgaagctcagcatccccgcggcggcgtcataggtgaacagcaccgggaagcagtcgtggccctgcgcggagggcgggggccattggagcgccgcggaggggaaaccgaggccggagggaaggccaggcgggcgtctggccgcccgggaggcagatgccagctcaaggatacagacgggccacagcgagggaggcccga

SEQ ID NO: 10927 - DNA, 691 bp, Homo sapiens
cggcgaccagcccccgcagaggcggggtccgagtccccagccagagccccaacaagcagtcgaagaacgcgggcagaggctccgacatggccaggagagcacgccgccgcccgtaggtgctcgggcctcgccgagaccgggaagaggtggcgccgccagcttttcccagacccaggggtggcccgacaggcctaaccccgctccccgccctgctcccccgtcccctcctccggcgacgcccggcccgcggttggccggcccgccgcgcgctccgggacgagggcgggaggcgagcgcgctggccgccgcgcactcaccattgtcaacgccgccgccgcgtcccccctactccactcctcttccctcaggagaactcccagccccggctccctccgctccggcgctccgtcacgtgacctcgggccgcccctcacacgtgaccgctcccttcctctcccccacccccgcacccgtccctctcccagcctcctgccccgccctgctggccgccaggcactccggggagaggccgcttggaggcggggcctcaggctccacccttcggagggtggagaggggcgggcaaattacgtcgagtgggcggggcctgaacagaggcgggttcgcgggctcctcctcgccgtctcttcggtcaccggacgagcggttccgtgtccggcctctttaccgc

SEQ ID NO: 10928 - DNA, 1024 bp, Homo sapiens
cgcgcactcaccctgggctgtggagcccagctggccgccgcccgcctcggccacgcgctgcggccccacgggcccgggagcgagggcttcgcccgcgccggacatgggccgctccgccgagcccgcgccgcgccgctgccgcctagctcgccgcccggcagggcgcacggaggaagggctgtgaggtgctgggtgcagggaactgactgcttctggcggaaaaatatacaaaattaaaaaaaaaaatgtttttagagaagagcacaccacccctgcgggacgttccctccccctccacttccctccctcaaactccaccccggggaagttttgatttgaaacttgcgaagaaaactgttacagcgcaagttgacagcggcggggtcccaggggtccgaggtggacccagcggggaggggctggaaagagagatcgggtttgggagaaccccggggatggggatcaaacccctcctcttccccgcccggagaccactacctacctccgcatccccccgtagtcgctccaagccccttcctcctcctcctcctcctcttccgccccggaaagttagcgagcctccggcagcggccgcattttcgccccggtggcctgacgacggcggcggccgcccctgcgcgtcctcccgcctccctccggctcagcccagacgccgcagtggcggcaactgcggcagcggtggcggctctgactccgcgcactccgccccctctttccagccagctcactccagccggctcccctgcgagggggccttccccctctctgcctctctttcccctcttccactcctacaatcctgaaacacttctccctctgttgctctttttcatcacatccggatcgggaaggcctcgaactcttggctagcggccccgatgctgggagcggcgcgacccgggctcggccgcgcgatccctcgcgccctgcgctgtctgggtcaggaggccagagccggcctgggctggctcgggctccccacccgggcgctgcgccctcccgg

SEQ ID NO: 10929 - DNA, 1339 bp, Homo sapiens
cgccgcgggtcttggcgagcaggtgatcacggatccctggtgtttgctgggcgagacggtgaagcaacctcctccccgccccctcccccgtctagaaaggtgcaagatccgctaaaccgtgcgttgcacagcggcggccggagcagacgcgggatggtcgcgcgtcccctgcacagcacagaggggcagccggagagcctgggaaaggtacgagcggggaatcagagcacagggtgcggaccagaaagagcagacggtcagtcgggcggggaaggaagttgccgagttgcaggtgtggaaggggctgccccaggcccacccttggcagacgagggggcggggagtcgcgccggggacgaggagactgcggaccgggcgcgctccttgcgcagtcgctcgcccgcgtgcccaagccccccgggaatggccctcgcccaggggcccagctcgccgccgctagccccgcagagcctgcagctgctggggcccggcagccgccagggggcgggagctgcgtcgcgaacaatggccgcgcttggtcgcgggccggcgggaggcggagtggaggtagagccggtgccgggcgcgcgcgccggccgggcgtgctggggcgcgggagcggctgcgcaggcgggggcgcgcggcgcgagcgcgggagggcgcggcgggagcgccggggaggcgggcggaggcgggcggaggcggggggcggggagcccgaggggtggaagccggcggcggccgagcggggtcagttctctgtagtgtttgccaatgttggagccgtctgcaaagtgtccccggcaagaaggtaaataccctcatcgggggcgtccgggagaccccgacttccgcgccgccggcgaagaaggcagagggcgctggggagccctgcagttccgcagcacggggaacccggagaaaagcagcccccttcgcggcctcccctcccccgcgccttccctcccacatcgggctctcggggcagcagcggggaggggagaccggcgggggagggaggacagggaggcgaaggaattggggtggggggtgcgtgtgtggtggagggggtgggacgacacaggtgtcctgaggggaggagccgggaggaaggcgaggaggccgggccaagtgggggtgcggaggtcggggagacaggaacgcggctgcgggcgcgggaggctggggttctagggggccggggtggtagcggccggaagagaggacggcgagtgcagccacggtgtggctgcgagggagagggagcgcctagagtagggcaggggagggcggcccggggagggtctgcgggaaatgggcctgggggcgctggaggcgg

SEQ ID NO: 10930 - DNA, 2273 bp, Homo sapiens
cggcctccagggaccgaggggtccgcagagtgacccatcccatccccgggaagctgccgggagccccgcggacccgccgcggcctccagcctctatgtgcaggggcctcggggttggggcttggccagtgcgacgccccgcccgcggccacctacagttgttgaggaacagcagcaccgcgaagccgagcgtggcggtggccagcaggatcaggcaggcgttgcagggcaccatgaagcctcgcaccagcagggaggcgccaggcggctgccgggtgtcccgcgccagcggcagcggaggcatggcccggggctccggctctgcgccccactctcagagcgtgggggctcctcacggggtgcccttgggcctcttcagggctgctcgccccatcctgggacccctggggcggcggacagcagctgtgccctcagagttcacccagtcacagccctgggggtgccaggtcccggctccagtcctccaggctcatcgtgggaggagggcagaattctcccggagtagaaatcccaaatgtgggctccgaggtaggcggaggagggactgggagcccgcagccacccctgctgcccacagcctccccgggctggccgccagcgctcggtcttcccggagcccccggagccgcgcaggccggagaggcggtgcgcgcggcaggtgcgcgggggccgggcgccgagggtctgctgtccccgtccccggcagaggcggaagcggcgataggagcgggcaggcaggaggggcggccgcgtcgggagcgagaagaaagcgccgcctgcggaggccgcgccgggtcccgggctccctccagctcccctcgtccccgcggggctggggaggtgagtgaggggcgaagacgccgcggagggagggcgggagcagagacaaaggaagccgcctccagggaccccggcgtccgcggggagttccagaggatcgggcggatgcggacgggagagcgccgcacaaaagggaacgccgggcaggcggggccgggggtgctcggctggggctggggctggggctgggcccggggccgggagcgctggggctggggctgggccgggactggggctggggtggctgaggctggggccgagggtgggcctgaaggtgttgggactgggggtgggactggggctgggcctgggggcgctgaggctgaagctggggccgggggtgggactgggggcgctggggctgggccgggggtgggactgaggctgcgggcgttcaactgggattgagtcgagggcagcggtggggctgggccgggggagcaggggtcgcgccgggcagcgtcgcgtgctggagcggaggcgggtgcggccggggcaggtcgcgggaggaggaagcgcctggggagcaggagctgggccgggcgggtccgcgccccgcacccgcgggggtgaatcggagtcgccgcagggggctcggggggccgcgtgcgaccgcgtgtgcgcgtcgtcgtgcgtgtgcccgcgagtgtctgcgcccgcggccccgccctggcggggcgtaggtgggggagggccccaggtgcggcgcgagctggagggtggagtgaggtgagcggcccagaaatcgcctcgcccactttcccctggggattgacagtggctcctccagtcgccggcgcccccgactcccgcgcggggcggggtcatgcaaatgagccccatgcaaattgcggcggggactccctgcgggtccgtggggctggaacgcccccaagaggccgttccgggaacgtccgggccctgacgtcactgcggcccggggcggggaatgggggtctgggcccatctgggactcctgacgcgtagtccggcgtccccacacccgcccccgtaggtcgcccctctccctggccgctgcccagccgggggatccgggggtaagggaggggcccgtccggtccggtgtgtgcaccatcccctagagtccatgccaggcccgaccaccctggaggccagaatctctcggcgaccgcacctcagcgcccccgcacacccctggccacccgcagcctttggaagggacccctgcgcacccattaccctgccctctcctctgtccctgcaatgaccgaccccattccccaagccccagctccaggaaagcaaggacccggcgccagggcgcttctgctccgccagtcccctccagcaccgcggaccaagccatctgccacactcggtctcacccactctgcagacgacagctgccggcagccaccagtgccaccgcgt

SEQ ID NO: 10931 - DNA, 5586 bp, Homo sapiens
cgggctcagccccgcacacggactcgccaggagtaggtggtcagcacgcgctgctggcggcgcaccacgcaggtgtaggtgccctcattgacggcgttggcgatgatgctcaggtgcgcctcgcccagggccaggtagccggggtaggagaactccaggggctcctggtccttgtaccagctgcaggggggcggggcgtctcctgcaggcacagccccccccgctgcctgccccgcacccctgccccaaggccgcccgcgggctgcccaccccgaggaccgcccggggcgctcactcactacactttccctttcttgtggaggatcttctggccgcagcggaaggtcacgttcctgccctcgggcaccagcctggttttggtcctggggggcggtggggtggtggccaccgtggggaaggggaattctgctccgggtgggggaaagagccccgtcagtgccccctcagccccgaccatggccaaggcccagctcccacgcagccctgtcccggccccgtgggcatcaccgtagcagaagtcgcagctgctggggcagagcctcttcatgagccgccggcgagcgtcgcagaagcccctccgcgcccaggacgcgcacacgaacagcctgtcgaggcatcctgtcgggagcgtggggagcacggcctggctcaggaccgcccggtccccgccctcccgcccgacaaagggactcaccgtagagccggtgcagcccccacagctcgtcctgggacaacgccttccagccgcgcagcgtggcgttcaggtgcatgagcgcccggccgtgttgtgagtgcatcaggcccagcgcgtggccgatctcgtgggccgccacgtgcaccaggtccgtgagccacacgcctgcgggccccgggggtcagcgcctgggagccccgggcccagccccgccgcccgtgggccagctccccgaggcccggtgtatctgctggagcgcagccgcggagccgccctcggccgcagccacggaaagataagaatgttctgggcccaggcggtgagctcggcccccaggaatgcagctccagctcccgctccagaggcgcagggggatgggaaagggagttcagggctgccgggatgggggctcccacgggctcccctccttgcctgctagactccagtggcagccaccaccccggaaggtccctcctgccgtctgccccaaagcccgaccgcggcagcccactgtgctgcagaggagaggcctccaggaggccagcctggacggtcacctttcttccagctgtagcgcgtggggcccaggacccagtactcgctgtcgtcgaagtggatgccgccgtgcggggggaagaaggcgtgggccagctcccccgtggggccgtcgaagcagtggtgcagcgcggagaccaggcagtccgtgtggttgatcgggtagaagcctggggggagcacggggctgagaggccgggcgcgcagggccgggccggggcgggggcgggcgcccacctatccggaggtcgctgggctgctcgggggccacctcgcggaagctgaagggggacacgtcgctccacatgcggaaggcggcagctagggcccgccgcgtctcccgcgggctcagcaggttccgcgggaaggagaggatcctgcagggagagtgagctcagcgggcgccggccgcgccccctcccccggggcccagccagggcgcacctgtaggtgaggttgaagtggtcccagcgcagcctggctggagtcagcgtgtagcggcgtctgcggggggccagtgggcccgggacccgggtgggggggaccgccgagaggcccagcgcagcgacgtctcccttcagggaagaaagcgtgcgtgggaggcatcggtgacggtccccaggaccaaaaactgccgcggaaaatggactggaaggaaacgggggtgggggtgcccagggctgggagcgggcgtggcgggtcctgtctgcctgtggtttcgggtctcctaacctgagcgccctgttgcacgtccctgggaacgcggcccagtggaggggaaggggctgaacagcagggcgaggcctcccacccctcccaacaactggacacaggggcgtccaaccctccgacctcgggacgcacatccggaccctcaaacaccccgcacaccccgcacacgtcctgcgggccccccgatagaccagacccacagacgtgaggacccccccaacccggcacctggcctcccccccgccgctcacctgcgctgcgctccaggccggcaccgccggggcccccagccgggccagcagcaccagcgcggggaggaggcacagggcgaccagcgcggctccaagccagcggcgctcgacgcctgcccccggggcctccgaggggacacgggccccgcggcccatggcagacttgctgtggggctcagggctgcatggggcagcaaggcgcgggggcccgggccgcagagcctccggggaggatccggaggggaggcagtggctcggcggctcgggttacagcccggtgtggtgggggggagggagacggggcgggagagggggcaaggctgcccctgaagggaaccagctggcccgtccgttggccgagctgcctgctgtctccagccgggggcatggggacccgcgtcccgtgggccaggggcagaggcctgggcatggcctgctgggcggggtcctcggaggggggagcgaagagggccccaggcagcccgggaagggcagcgccagggctcccgcttaggaaagggtagcagtgggggtccccaagcccccactgctgggcagtgagtgatctggtggcttttttcccaaatggaatcctcaaaaaacccctgagccccacatgagcggagtctccatcctggcccaggcagctgagctgggccgcaggagacgcgtcgctcgcctgacagtgtccccgagagctgggaggggatggccggatggggacgtggcagtgagtatggggcggtggagggggaggcggggagggggtgcgtgggtaggcaagggccgcggagggtgccaggttgcggggcggagggagggaacttgccagggtctcccggggagccgggaaggggcgggccctggctgcgggaagccccgtggagggtagcgcgtgaggtggagggtgtgtggctcctaaatccccggctaggccccagcaaaggggagagggagacgggagggacgggaaacggagctaagcgccgggcctggaggtctggaccggtcctgattgggggcgggggcggggagctcggagacccaaaggttcgacggggcggccggcgtccaggcgcgagcggctctgggctgggaccgagaccgggcaccggcgtcccgcggggcgggggtgggggattgggcagaggagcaggagattccgagccagaccggcctgtgtctgtctcgtccctccccgttttccgcgccggcgtcgggcccagggtgacggcagcccggccaacggggtcagcgccaagcagctggcggcggccgcgggcggttcttggaaagcgcgagaggctgggcctggccgccgtatttgctccgacaccgccccccgcccccccagctcgtcaccccgcctgcgtgcgcccggcccccagaccctgcctgggacgccccccaactaactccctgctgggacgggaccccacagccctggggagtgtcgggccccttggatcagagcgcgagtccccgcggccgcccccaggacggaagagcgaggggggcccgggggcagacacaggagtccccgccccgtcggacccgggcctggggggcgggaggcggccgtgcccgcgcctgaagggtgtcctggcccgaaggccgcagtccgggcgggagtctggacccgagagcctggggcgggcggggcggacccagggaagggccccccctcctcgcccccaggctcgcccgcgtgtcccgaggggaggaccccagaggcgcccggtcccccaggcagacagcagaggcaacgtccgagaatctttctttttataaaacacagggcgggggcacgcgaaggcagctcgggcgcggcggacggcgcggctcacacgaagatctggatgcggtcgcggatgggctggcggcagatggggcaggcgctgagcgcggagccgcagggggcgcatgcgccgtggccgcactggaacacgaggcggatgtggctgtcgatgcagatggggcaggtgatgcgttcctccatctgccggtagcggctctgcagctcctccaccagctggcgcggcgggccgggggcgggggcggcgctcgccacctcagagccgtctgcggggtgggggacgggtgtgagctgggaggccgggtgggggaatgcggggagcagggagctgcgggggggcgaggctgggggcggggtgtcacctgggacgggttgtgacctgcaaggggggctggcggggtgggtgatttggaggcagaggtggggcccgggtgcgggcaggaggtgagccgtggaaatcaggcataaggtggtgtgcgggctggagtcagggctgcaggtgggctgtgagctgggccggggtgtgatgggggggcggtgctctgggtgggctgtgatctggggtggggctatggagggagtgtgatctgggaggggccgtgaaatccagcggggctggggtgtgatgggggaggagggtgttaccttgaggcggggctgtgggccgggtgtgatctggagcaggcggggctgggggctgggggctggggggccgggtgtgagccttgggagggcggggtgtaacctggggaagggccatgggcggaagtgtgggagggaaggggtgggggacggggacccgcgggccaccagctgagcaggaggcgtgttgggggcgcagagcctcacccacctgggcgcagtttcttgctgacgaccacctggcacctgatgcacttcttcatcctgcgcgcgcactctgcgaagaggagagcgcggttggctgcggccctactagccgggcctccccaccccggggccccccactcaccctcacacacggtgcggtgctggcacggcgagaacagcaccagcagcgccagctcggagcacaccaggcactcagcggcctcgggccccggcgcggcgcccacgtgcaggttcgtcacggtgttgggggtcccgagcgtttgcctggggcccggggccgcgcccccgcccgcctgccgctccctgcagggggaggaggcggcttgagaggggcccggaggccgccggaccccatccccgccgtccacggactcaccggaagcgctgggcgcagccctgaagggccttgagcacgcgaccctcggcggccaggtccagcgggctccgaccgcggtggttggtgtagctcacgtcggcgccctccagcgccaggaagcaggcgaccgccgcgcccaccgtcagctccgcgctgccggggaggcccgaggcctgtagctgggcggcaggacagacgccggtgagggcgggcgccggggcaggcccgagggaggcgtctcctggcacctggcagccccagcagccggcgc

SEQ ID NO: 10932 - DNA, 1264 bp, Homo sapiens
cgcgggtgaatcgagcgtccctccgctcccctggtctgtagttagagacagtcccccgtcgcccgatcccgcacccgctgaggagcgcagggctgtgcccgcacctcgcctcgcacctgtctgcccagggaaaccgggagctccgcgggccccgccgcgggaaggaggcggcactgggtcccaaaaacccgtgttgaggagaagccgagcgccccaacacactcgccgccggccgggccgggcccccgcgcgccccgacgccgccccagccccgcccgcgcgcgcccgacacgctcgtccccgccctcgctccgacacagacacacgcgcgcgtcctcgcaccactccagaagctcatccggcccgcgcgcgcacccagacacgcgtggctcacacccgccgcacacgcccctcgcacaaacacgcgcgcccctcacgccctcggccactccagacacacggccccgggccccacgcaggctcgggcgtcgacacaccctcgcggcatggacacgcgtgtctcccacccactcctcggccaaacgcacccctccctgcagcccctcacccttgctcctcacactcactccccactctcgccccagaaacacgcccctcacaccgggcccgccggatccccacacttcccactcgcgccagaaacgcgcgcaccctcgtggcccctccctgccgcgcgtaaacacgcccggtccgcgcacgccctcccggcctggccccgcacactcgcgccagaaacacgcgtggccgcgcaccacgcccccggcccgcgagcacgcgtgtccccacgccccggccccgcccccgccccgcgcgcgcccccgccggccgccgccctcgaccgcacgcgccctccgcctagccccgcgccgccgcgcacctacccggacctgctgagctcggctcctgctcgtcaggcttgcgccgagccgccgctcactggctcccgcgccccgcccggccccgcccggcccggcccagcccggccccgcgcccgctcagctccactcgccgcagctggaacgactcgcggggctccgggtaccgcggtctccccgccactgcccgagtgcgccgcccggaccaatggcggggcgcggcggtgagctcaccggaccagaccccgccccccaggccgcgtggtccaatcggaggatgcgacgtcacccggagccgggcagaggctggtgcggggcgcggagccgctcggcgcggggactgcgccggaactgcgcccgagccgcgc

SEQ ID NO: 10933 - DNA, 716 bp, Homo sapiens
cgacgggcgcgtgaggcccagagaggagcagccccgggacccgtccctccccttgcctgaccctggctaggaaaaggggcctggagcgcccccgggctccggaaacgcgggaccctccgcaggcagccgagcagggcggccgccggggtcaccgctgggcgccgccggagctttaattcgatccatgtgcgggactccggccttttgtgcgggagcttccgccctgcgcgccgggtccccggctcccgctcccgggctgggactcggccctccgccggcctcactgagccctcgccccggacctgccgactccccgactccggggagagagaccaagagactgggacgcaaagggcgtgaggaccgcaccccccacccgcaggcccctccaggggcgccgcgccgggggtcccggctggcgaccgagcaggctccggccgagcactgccggcgctgtcacctgtgtgcaccggggacagggacggagggacgcgacccccacccacccggcccgcttacctgggccgcccgcgccccggcggctccgatccgacgcccgagccagcggagcccggagccgctgggcctcccgtcccctccgcccgtccgccctccccgccccctcggctccctccgccccgccgccccgcgccgctttaccataaaaggtgaggctcggggggagggggcgcgggattcccgccccgcggaagcgg

SEQ ID NO: 10934 - DNA, 619 bp, Homo sapiens
cggtggaccgcctgggcgggcaaacgctctctcacgctggcgggcaggatttgaacccgggttcctagggctctgcaggccgccactgtccccgtcctctctctgtctccggcttctcccgcctggcctgccgcggcccgccgccccctccttcctcccctcttccgcccgccccctgccccctgcctcctccctccgccttctcccaccccctgcccctcgcgacttccccctcccccccgatcctccggcgccgccccctcctcctccttgtcctcgcagcccaaatacgcgacacctggagcaatagcagccgcccggcggcctgggcctcattacaggccggcccttatcgcggcgtgcatcacattatttcatttcaaagaatccgcagagaaacccgtcccggccgacaacagaaagtaaaaacacagctgactcccattagggccctctcacaggctccgcgtgaggtaatgaaatatggaagcggtgagatatgtaatgctttattaagcggtctcagctacaacggcgtgcatgccaattacgcctgcaggctaccgcccgcccccggctgccggaccacccagcgcgcctccccccgagtcccggacgg

SEQ ID NO: 10935 - DNA, 293 bp, Homo sapiens
cgctttacggggcaaactccgaggcccagccccgcgtgggagccgcagcggggcgggcccgctctgggctgggcgggtttctctagcgcagcgctgggggttgcgggcctctcagcagccggagcagcatcctgagctccggttgttggagcgctgggacctctggctgccgcccccgcagcagcagcaaccactactccgctgtcggcggcgtctccttgggaagcagcagcaactggtggagctggagccgcagcagcctgagtcgccgcagcagcccctgccggagccgc

SEQ ID NO: 10936 - DNA, 2748 bp, Homo sapiens
cgaaccggtctcctccggcttcgcattctccagggccgcccggcgagctcttgcatgttccccacccgccaagcccgtcactcggccccgccctttcacacgcgcattggcacgccccttcccagcccccagcgggcgggcagcctgccgggtacccaggaagctcgggtccctcggcgccggaggacccacaacccagccaccgcaacaagtccgcgcagccaaagcagctcgcctgggcaccaggccccaccgtccttgttccgtggccccaagagggcccgtgccagttcccgaggcatggccgcctggcgtccggcacatcccagatctattcctctctgagggcaggggctctccggggagagaaagagcagttccggggcccgcttcgggtttttttgcatagactcttcaggcacggagaacaatggaacagctctgcgcgcttcctccactcgagcaagctttgttcctcccttcccgcctgctcggcttccattagccacagggcaaaggcttcccggtcaaacaggagtctcggcgctaacgcccagagctttcgacacgccctaaaagacctgcgggtgtaggggttggggccagagccggggctgaggtatcggacatgcgcccagatgcgcacagctggcagcccgcccgcccccggccctagacgcttcttttagccagaatcctcacaccgcggggaaatccgacttgcgctcccactcgggatccacagaggaagtggagcctcagctgtgttccggggccaatcagccctcacatctgctctcccacatctgtcctctagatccgggctctcgctggacgctccccttgcaatgcgggatgctcctgtcaagcgcaggccacaccacaacggaggtttccaccagtcccaggttttgccatattgggattctggctctatttctgagagcctgtaaccccctcaccccccatcccattgtccagcctcacctcgggcaggccagagtcgagcccgggttcccgcctgtaatgtctttaagaaggtacacttgagccatgcgcatctggaggtgggccagctcagcacatctgggcgcaatgcccatcacagcctgatcgtgaacaggagggccctccgggaaggcgcaaggggagggggcttcgctttccccacaccttccccagcagctggttaggagaaagccaggggcggggcggggcggggcggcaggacttacccagcatctggctgaagagcagctgctccaggtctcccagcacggtcaccaccagctcggggtccaccttgaggaaggcgcgctcctcctggcccttggcagaggggacaggcccagagctcttttgcgccttggccttgctggagagcagctcgtcgtccgatttgccatcttcgctcacggccgcttcaggcgccttgctgagcggcttgacctccgcatagggtcctcgagggatccggctcggctttcccaggttgggcgcgagcggagccaggggggtcttggcgccgcccgccgggctgcccttggcctggaagagcgagtgctccgacttggacagcgtcttggacatcagcggagcttcacggcccttggaccccaccttgcctaagcctttgggcgccttggccatatcgtcgctccattcgggctcataaagctgcagctttttctcggagtccgtgagaaaagagaggttggtgagtgacttctgcttgcgcaggttggaggcgggcggcccgccggggacacggctgtccacgctgccggacttgaagaccttcagctcagccgcgctggccttggccatgccgccgccgccgccgggcgccttggcgcgcttgggcagcatgcctctgccgtccgccgctgccgccttcctgccggcgccccgcggttcgtccgcgccctcgtcgccgccgccgctgctcagctccacctcgggctgcacgctcttgacgctgctgcccagcattctgcccgcgaggagcgcatggacgatccgcgcgtctgcaggcacggggggagggggcagggggcgggagcgcaggaggaggaggcgggggaggaggagggggagagagaggacggaagaaaccgaggaagaaggggagagaagggggagagagcgagggaggagggagagaggcaagccgagggcgcaggggaaagaaacgcgaggaaggaagccgggaaaaaggaaagagcagggaagccggggagcgatagggcggggtcggaggaaaaggggcggggcggcggggaaaatacaaattaaaatttaaaaatcagtcaaaggaaggatggaagccccgcggctcctccggcgcccagcggtgcttttgctttggtgtccggatcccagcccgcggcctgcctgcctgtcagtcccgtggacaccgcactgccgggcagcgccccggccgcactcagccagccagccagcccgagtcgaggctgcaggctgcagctccgagcagaggaaggagggaaggggaaggcggggagcaaacaggaggaggggagcgagtgtgcgcacggggagggaggtgggggagagatagtgtgtctatttctggctcgggagggggaggtatctgcgagcggagctccaggggcggatgagtggggggtagggggaaataaaggaaaagcagtttttctcccagctttccgcgtagaagcggggcgggttcttggattctcggagggcacggggaccccctgccgt

SEQ ID NO: 10937 - DNA, 433 bp, Homo sapiens
cgggactgggcgctagccagcagcccgcaggaccaggcggggacaggcgggcagtactcacaggtaagccgtcagggggtccaggtcccccggaacggcggacagcccgagctcagagcagtcggcagacagcatgatgccgtcctcctggcagtggcagggggccgggcaggcggtgggccccgggccgggctggggggcgccgccggccctccgggaagcgcacagcgcggcgcaaagccatagcgcccggagccccggcgggctgggcatctcggcggtcgggctactggggcacctggcggccgggcgcggacgcacggcgcgatggccgcagctgcttcctcccggtcccggcgggctgcaccgtcggtggggaccgccccaggggctctattgggcggcggcggcggcggtgggagcgccgggacgg

SEQ ID NO: 10938 - DNA, 1376 bp, Homo sapiens
cgcgggatccccactcctgcgaggcctccagagcccttctgggaggaggcctccgctggaacgtgtctgggtgaggagagggagatcggctcccaggcagggacggccagggtgcgcgcaccccagcttctgggccatcccggcgggagtctgcgctccttttaggcgcgacccccaggaaggtctcgggtggtgaccgcagattggagagtgagctgggctggggaaagagtgaggcggatcgcccccaacctccggcaaagtgtgcgcccccgccccaccatccaggggcggcggctcttgatgagctcatgggggcggggcgccaggagtcccgcccgcgagcccccccctcgtccccgcgaagcagcagtccggaatccgcggccagggacccgcgcaggcccctccttagctgaggggcggccgggtactcgggtcccgacccgcgaccaccgcacccatcaccaccacagcgggaactgcccggcggcccccagaagccccggcccggccgcagaggtgggcccccgagcacagaggccccgaaactcggctcgcagccctcagccccaatgtcggggggcgcggtggccccgggcgaccccccaccccgctcctggagcccacaggtggccccacaacttcgcggcccgcgctgcgcccgcggggcctagcacgctgccgcgggacctgcccaacgtggagtgtgtgcctgccccctcccgccccggcccccggcgcagcccttacccagaagacgaaattgaagacgaagagcaggtacttgatgcacttggtgcagccctccactcccatggcggcgcgggcggcgggcggcctgcggggcgcgggccggtcctgggcggcgggcgggccggcgcggggcctggcgggtggccggcaagggggcctggcgggccgaggggcgggggcgcgaagaaaggggcgcgggggcgcgggggcgcgggggcgcgtggggcgctgggcgccggaggcctggcaggatgcgcggtggggtcgccgccgtcgccgccgttgcgcgctcgctctctggccgggcgcgcgcctcgctccgcagtacttatagggcgccgcggtcccgcccctccataggccccgccccggccagctcacgccccgcccccggccccgcctcctgccgccagggcgcgcagccgaggggtatggggtcgctgcacctacccccaacttggcgcgtttcggccaggacctcagggcccaggtgcaccgtgctgggcgcgggaggcgtccccaagctgctgtcgcgctccgagcccccaagggggtggcagcagggccgcgcctgaggacaggcatgcagcgtctgcccaggagtgcagccccggtgccgg

SEQ ID NO: 10939 - DNA, 3393 bp, Homo sapiens
cgcagcggaggcgggaggagagtctctggcgggcatttgtcccccgcgcccctcgcgcgcccaaggctgggctccggggcatctcacccgggccgtcccgggtccagccccagtttagaatgactccacaccccccacatctccaagtctcagaaaccatcgttctgagaaccccaaggaggacaccctttcccgggtcttctgcagcgccgagccccggcaggcctccccggcgctcgcctgctgcgagaccttcctgccgccccgaggagcacgagaccccagccgcctgcagatcacccacatttgcggagggtggcagcaggggcttggctggtttgaaacgcgccggggaggcgcgcgctgcaccaaaccccgtccctgtccccaagggcagactcggggtaaggggaccaagacctccgacgcactcagcgccatggggacagccatggccaacactctgtctctgcggtcaatcccaaggttaccaaaactctccatccgcagagagcgcgcacagcagtgcggacactcggggactgccttaaggaaggctgagccctgggagcgcgtggactccgccctaccgcccggcgattggctcgcggggctgggggcggagaccgagtccgcgctgtataaatattcatgagccggcagcgcggcgcgagcggggctggagccgggaagttgggctaagggcgctgctcccgccgaggaggaggcggcggctgggcgcgggccgcgccactcaggtgtccgctccgccttccggtctggatttgctcctgggtgtccagcaggaaggagactgtgtgcacctcgcccgactgcggccggagcgcggcgctgacttttccaggcggcgggggtccgtctgtcccggcggcggacggacgaaggacggacgccggagaaagagggcggcggcctgggccgaggcgggtccccaactccggcggcggcggcggcggcttggccttgggggcgggcatgagcccccgggggccgagtggtggccgccagggctgacccggcgcggcaagcggcccggcccagccatcttgactgcgcaccgcggccccagaggaaacttgcggcgcctccgccctctctgtccggcggagtcaccgccgcccggcgcggcggggagaagtggtcgggcgcgcggagaggaggcgagcgagcgcgggacgatgagccgaggcccggccgctctgcgccgcgagggctgagcgcgacccggggccagcagagcggacctacggactgtggcgcgcgcctgcagccgccttcaaacccccggagcggcggaaaggagtgcggaagggccctgcccaggctgcgggccgcgccgctgcggacgcgcccctagaaggggttagattatcggcagacccccctcccgggcgaagcataagggagaccccagatcacccgctgtacccgtctgcggctctctcgtgggccccccccccggcacccctctgcgcgccgcctggagggcgagggcaccgggccgaggcgcacagcatggagtggggttacctgttggaagtgacctcgctgctggccgccttggcgctgctgcagcgctctagcggcgctgcggccgcctcggccaaggagctggcatgccaagagatcaccgtgccgctgtgtaagggcatcggctacaactacacctacatgcccaatcagttcaaccacgacacgcaagacgaggcgggcctggaggtgcaccagttctggccgctggtggagatccagtgctcgcccgatctcaagttcttcctgtgcagcatgtacacgcccatctgcctagaggactacaagaagccgctgccgccctgccgctcggtgtgcgagcgcgccaaggccggctgcgcgccgctcatgcgccagtacggcttcgcctggcccgaccgcatgcgctgcgaccggctgcccgagcaaggcaaccctgacacgctgtgcatggactacaaccgcaccgacctaaccaccgccgcgcccagcccgccgcgccgcctgccgccgccgccgcccggcgagcagccgccttcgggcagcggccacggccgcccgccgggggccaggcccccgcaccgcggcggcggcaggggcggtggcggcggggacgcggcggcgcccccagctcgcggcggcggcggtggcgggaaggcgcggccccctggcggcggcgcggctccctgcgagcccgggtgccagtgccgcgcgcctatggtgagcgtgtccagcgagcgccacccgctctacaaccgcgtcaagacaggccagatcgctaactgcgcgctgccctgccacaacccctttttcagccaggacgagcgcgccttcaccgtcttctggatcggcctgtggtcggtgctctgcttcgtgtccaccttcgccaccgtctccaccttccttatcgacatggagcgcttcaagtacccggagcggcccattatcttcctctcggcctgctacctcttcgtgtcggtgggctacctagtgcgcctggtggcgggccacgagaaggtggcgtgcagcggtggcgcgccgggcgcggggggcgctgggggcgcgggcggcgcggcggcgggcgcgggcgcggcgggcgcgggcgcgggcggcccgggcgggcgcggcgagtacgaggagctgggcgcggtggagcagcacgtgcgctacgagaccaccggccccgcgctgtgcaccgtggtcttcttgctggtctacttcttcggcatggccagctccatctggtgggtgatcttgtcgctcacatggttcctggcggccggtatgaagtggggcaacgaagccatcgccggctactcgcagtacttccacctggccgcgtggcttgtgcccagcgtcaagtccatcgcggtgctggcgctcagctcggtggacggcgacccggtggcgggcatctgctacgtgggcaaccagagcctggacaacctgcgcggcttcgtgctggcgccgctggtcatctacctcttcatcggcaccatgttcctgctggccggcttcgtgtccctcttccgcatccgctcggtcatcaagcaacaggacggccccaccaagacgcacaagctggagaagctgatgatccgcctgggcctgttcaccgtgctctacaccgtgcccgccgcggtggtggtcgcctgcctcttctacgagcagcacaaccgcccgcgctgggaggccacgcacaactgcccgtgcctgcgggacctgcagcccgaccaggcacgcaggcccgactacgccgtcttcatgctcaagtacttcatgtgcctagtggtgggcatcacctcgggcgtgtgggtctggtccggcaagacgctggagtcctggcgctccctgtgcacccgc

SEQ ID NO: 10940 - DNA, 1381 bp, Homo sapiens
cgtctcaacgtgctgctctggtaccaggacgcgtatggggaggtggagataaacggtgcgtggggcccgcgtgggcgcgaggaggggtcgccacggcctccctgagagtgcgctgctgagctcggctttggaggcgtgcggcggggaggggttagcccccgggtgctctgtgcggcccggctggggttaaagtccggggcgggtctgcccctgtgcacgtgggagatggttaggggtgttggggaccccgagggctggtgtgaggcctcgggagccatcggggtgactggccgccgtccgcagacgggaagctctacgacgcctacgtctcctacagcgactgccccgaggaccgcaagttcgtgaacttcatcctaaagccgcagctggagcggcgtcggggctacaagctcttcctggacgaccgcgacctcctgccgcgcgctggtatcccgggccccaccccgtgccccgcccacccggagggcccgccccgccccgccccatgctccgtcccacccggggccccacccccaccatcgagctccgcccccatccccgcccacccgaggccccgcctcaaaaacccgcccaccccgcaggccccgcccctcccttagagctctgcgtccggcaccgcccctgagcctccggccccgccctcccccgcccccgcccctgcgccgccgacgcccgccctcccgcagagccctccgccgacctcttggtgaacctgagccgctgccgacgcctcatcgtggtgctttcggacgccttcctgagccgggcctggtgcagccacagcttccggtgggtcccgcgcggggttgggtgggccccagcgtagcacccacccccctgacggtcccgccccgcagggagggcctgtgccggctgctggagctcacccgcagacccatcttcatcaccttcgagggccagaggcgcgaccccgcgcacccggcgctccgcctgctgcgccagcaccgccacctggtgaccttgctgctctggaggcccggctccgtggtgcggagcaggcgcgggagggtccggggctagcggcgggttagagatgggcggtgcccgggctccaggctgggacccctccgtggggagctctgcggcaccacgctttgtgaatgggccctggggggaggttccgctgcctggggccccgatgcggggagccgcccttgaggcccccggagccacggaatagctgtcgcagggcgtggaacccgtgggcagccgcaggtgtgctcttgggggccaggacgccaggggcttccgaggtgttcacacctgcaaaccgccccgacctggcccccagactccttcctccgatttttggaaagaagtgcagctggcgctgccgcgg

SEQ ID NO: 10941 - DNA, 493 bp, Homo sapiens
cgagctgcccttgggcgcgcctggggctgcacctgggtcacgtgggcgccgttgtgcagccggcacctcccggccaaccccgcggcttggagaaggggctttgcacccgccgccgctgtttgtcctcgcgcggcccccgtccactgccctgcggttgctctgcgggctgaaaagtttctcccggtgcagaattccgggctcagcgacagcctgcgccgagtgtgcgcacctgtcggagacccgccagtccgccggccgcggtgagtggtccctggagtcactggctcagggcgggcccgcgggatggggcgggcggcccggggcgcagccggccaggccgttgctatggcaacgcggtggaaaaacgggcctctgggtatctcgctgccggccggctggtaaccccccagcggagggaccgggccgagcccgcggacccctccgagtgtctcctggggcccagccgttggtaccccatttcccccgggtccgg

SEQ ID NO: 10942 - DNA, 922 bp, Homo sapiens
cgtgcccccctccgtcacttggtacggcccgtgcccccgccgctgatctggcaggctgcgcgcgcacactccggccgggtgcgggccggcggggcacagcggcctctacggcccgcctccgtcagtcattccccggtccctcctcccgctgctcgcgtgctccgggccggcccagcaccctccgagttacgtgcccgcgctccccggcggggaggagcgcagccgcgggggcgcgccccggtgactccgcccctcagctcccctcccctgagcccgggagcccggctcgcgcggctaggtgcgaggagacccgggaccccacgcccgcccgccctgcccagcgccccagccccggcgtgcgaggcgccgctccctcctctgccctgcgcggtgcatggaggggcccgttcggatcgcagccgccgccaccgtagccgccgccgcgcgcgcgcggggggatgacctgggggtggctttccgagccggctgcagcgcaggaggtctggaggcttagccagccccgcggagaggtgcgggggtgggggtcccgccgcagggtcggagggaggggtggcgcgcgggcactgggcttggggggccttggcttaggggacgggaggtcccggggacgggcgggccggcgttccctggagggcgtgggggtgcagggctgcgtgcggggtctggatgctgatgcttgcccggcggggagccccggcgttccgcgtcctcgggggctcggaggcacctcgcgggaggaggcggggtgaggtgtcagtgacacgacgaaacctcttcttgacgatggtcctcgggggcaggtgagatgccgcagagcggggagctagggcgcccgcgcgttttcccaagggagccgggtccctggcctctctcaatctccatccctgcagagcgcccgcga

SEQ ID NO: 10943 - DNA, 719 bp, Homo sapiens
cgctcgaggatgctggaggtgggggccgccgcttcagtccgggcgcagggctgggggattgggggcggaaactttccgcagaactgtcccgcttgctcactccaagggaacggagaggatccggcttcccgcgaaaatctggtccagggaaagggaccccggaaagcagctccgcagggctgtggcagccccaccccgacccgcgctgcgcccacgtgcagggcccgaccccctccgggaggcgcggcgccggctggggtcaggcggccgaggaccccgcggctccccgccccgccccgccccgcgggcccccgcgcaccgccgccgcgtactcaccctcacgggtggagcggggcggggcagcacggttccgcgcgcagctccgatccgctaggcgcaccgaccggcggcgcagcgctggcgcgacggctcgactcggccgggtccctgtcccgggcgcgggtccggcctgggagcgggcgagtccgcctgcaggggaggcggggacccgggcccgggttgggggcggggaaggggctggacacgcttgcgcacacggcggcccgactcccaggagctcccgggaggggtagaaagggcggggtggaggagggggaagggcgggggtgatgccgcgcggtcgcaggcttgggatggtgttcgcgcctccgagacccggacagaggcaagcaggggcgccgtgggtgccagagaggcgg

SEQ ID NO: 10944 - DNA, 958 bp, Homo sapiens
cggtgcacggggtcacacagtcggaaacccttgccggccccgggttactccctttctgaaacggtcttcctcggagccatcccctggaggaccccacttcgctcggtgcccgggccccgcacccaccctccccttcccggcccgcttcccgcacggcgcctactctgttcctcgtcctctcgtcccaccgccgccctgcccacactgcctcccgtgggcgcccccggccgctcccccttctcgggtctcggcctgggggtgcccagcccgcccggcgccggctcaaggccgcgcgactccgcacgctctcgagacccgcctcgccgcccgccgcccgggccgcactcaccgcgcccgcaggacctgggggtctccgctctgctcgcgctccggcaccgccgccgccgccgccgccagcggaaacagggggcggggcctgcccgggaatggcgagcctgcggggcggggcggcccgggggcggagcggggaggggcggggcggagcggggaggggcggggcggagaaggatcgcagggctgagcggggcgccagcgccagtgcccggcactgccccgggctgggtcccctgcgttagaggaaggggagcccggggacggggcacggggcccgcgaggcacgggtgctctctcggggttccggaagcctccctccccgccccgccgcccgcatgcccggaccggccgctcctccgaggtgctatgatcccgccttccccctgcggcgaacgggcctcttcccggggtaggggcggggaggtccgggcctggcagtgcgctctcctgggctctgcgcccacacggcacccaagggccttcctggcccaggcctcggctctctccctcgcgccaggctgcctggcctcgccaccccacccccacacctacgaaccccttccctggtgtttcgggcggactgtgcgagatgctgacagcgcgg

SEQ ID NO: 10945 - DNA, 3843 bp, Homo sapiens
cgcgcgtggcccccggagaggcgcccatcacctgcgtggcgcccccccgcgccggagtgcggccctgctcccagcgccagtgcgccgcgcggctcgccggcctcgtaggattggctaccgcctcccattcatgtaacctgcgtgtgcgtgtgcgtgtgtgtgtgtgtctctctctcgctcgccctctctttctgtgtgtaagagagcgagggtgggggacggaggcaggcaggcgagcaggcagggaggggaagaagagaagggaagctattaaacacacacacacacacacacactcacacacgcgcgcgcacacacccgccccaaccccccagaagcctcgggattgcagctgtttcatgtggggcagcagtgctggcagggacgccggccgggagcggccgggagcgggagccggtcgtgcgcgcgcggctggaggctcgctggggctccgctccccgcgggagctattgttggtctcgctggagctgagcgcagagcccggacctgctccttcctgggcgccccgctacggctcgcggagcagaggagccgcgccgccgagagagagaggagccaccggcgcggcgccttgcctccctgccgccgtcctcgccgcttccccggcggtagcagcctgcagccacggtaaggcggcgtgatccgctctacggaaaagcgccttggggaccgcggcgacgcctcgccagctccatcgccctctgcactgctggcccgggcagggttcgggtagctcacgcggctgccgagggctccgggagatgtttgcttgctcccctggcccaggaggagggaggctagggcgcgggtggccgaagaggcaagctgttctggagcctggagccgccgcagcccccggagcccgccgcggactggagcctgggagcaagggttgggggagggcagggaggtgggaagcgggtgggagggaggcggcgcgccccaggttcgtctgcctctcccggatcccgttccccgccccggcccggtcgcctgcagcccctctgcagactagctcgccccaggcccccgtcgggcgctggaggagcccgcgaggcggcgccgggcttcagcggctgcagcctgccctgcggggcaagtgccggctgcagcagccccgcacgggcggtggttggagctcagatcctggagatgcgaccccagctcctcgccctctgcaacccgcggggcgcccgcctctcctcaccgggcgcccggccgcggtattgatgttcgtctaggagccaactgaggctgcagccgccagatggacgcttggagggctcccgggtgtgagtgtgactgtatgactactctcacccccagcttcgggaaatgtgctctgggttgaaatgtgatcaccgagctcctcagtcattttaattgccatttttaaatgcggtcgttacattggaggagcagactggaaggtagtggggcggcgtgtgtgtgtgtgtgtgtgtgtgtgtgtggacacacacacgcaaccgaggaatacacaaccaactacttgggtgaagggcggggggttcacctagtgagtccttcttggcgggggggtcgggcgagttagctgcccgctgcccgccccttctctgcctgcccccgcctaggcgaggttggaaagtactggaaattcagctgcgtggtccttaactttggaaattggctccgctttcagggcaaaatgttaaggcgatttatgcacccgcgtccatgtggatgagtgtattactgctcagttgggtgcagagccctcaacagtaccgcgccaagcccccacccgatctctaactccctcccaccccctaaccgtggagagagggtttatagaaatgcagttatctgtaaaccatcgacgcagtgaaaggggcgcagggaggcagccagagttttgcctgaacctgcatactggcttggtgtttgtagcacacgagatcaccccgctgctttgtagaaggcggtggtggggcaagctcgggattccaatcgccggggtggggggtggggggaagagggtgcccatgtactgagctctgaggccgagtaaggagagagatctgctgagcggcatcgcgggcaattacataagctgcctcggtgattacccggaactgtgatgcgagctcccggttctcgaaagacaagcctgaaagtttgcctgcttggggagtgtaagtaccggggcgcccccaccccggcctgggtagctaggatacgcctcgcaccacggcgcccacttgtgcgatgggcgtcgggtgctgatgctgctgtccccaaagaaccggttaccgaggcagggactaagtgggggcatccggaattgatcgcagaggaggagtcagtcagaactgaggtttcattgggtcttcagagctccaagtcttccctcggaggtgttggaaggccttccagggaacgccgttttcagaaactgacttggtgtcctggggagccccaaagcccctcttttccgcccttcctgggcgcccctccttgtctttcaagccctgtgcccttcacgtgtttagaaacctgcccgcggtgcctggtcccccttggagatgcccaggcagcccagccatccaggcccacgctggcgaggggttagagggagtagaacgctggctctgccgggctgccacccttacctacacctattcctggtttcctgcgctagcccggcgctgatggggacgggatggggctggggtcgggtatggcttccgttccttcgcctctcgcctctgcagacagcagtttgcttctgttgcgtttattctccccgtttcgccgcttccctccagcgccgcagcctgtgtatcacgttgatgggctttgatagagaaaccacagtaagagtatgcttttaaatcttgattttcgtctgtagggggataagccaccccagccctgacacagccgtggggaacgctgaagtctgggacacattggccctgaactcccttccccccagcccgcagtcaggagatggtgatgtgcatgggtggggagtgttttgtttttgccacattccagcgtcctgaaacctctcgtcccctcccactgaaatccccgatctgtctgaatctgttccttgctgtaaaataaatcctccctcccgcagacctgtggggcccttcggatttcctgccgctgccatgatccttaacaatgcgattgaaaagccagtgctcggctggaaaaaaatccccaggtgccagccggccgcgccttgaccttgctgaaggagcctttaacccggctgccagaggggctctggtccagccgtgggaatccaggaagaaggagggcgccccggaggcggctgggttagctccccgggcagggcgggaatcaggtcgcggcggggaccgcagagggggaggggacgggactccgcggcaacctgtttcccggcgagccgggcccgcgcatcccagctccctcgccccagcccctcgtggcccgcctcccccgccggcctccagttgtcttcgtggtacaggagtcggccgcgactccctcgcgctctccgccggagtccgcgggacgccgccaactttgggctcctcggtggccggagcagcggtgcgaaccagcggggcggccgggtgggcggggcctgggcgggaaactggagccgagaagaccgcgttccaggccaagttccagccgcaagcgccgcgcggcacagtgcagggtcccggccgcgcctttctcccgtccccggcccggccgcgttcctgcggactcacagcgcgctccgggcgctctgcagttgggctttcagcgggggagcccttctcgtcaaagttacga

SEQ ID NO: 10946 - DNA, 384 bp, Homo sapiens
cggttggccgggggacgtgtccgcgctgctccccctccggccgccagggggcgcaggaagaagctttggaggtctgtcccgggaccgcgtactcgtccttctttcccgttagtcttttcttcacttccgttgagttccgcctcgccgtttgtcccttgcggtacccgtccgcatacgaatctagcccgggaaccgagttgcgggagtgcggtctgtgccgttccggccaggagtttgccgactgcagacgtcctgcgaaccggcaagatgtgctctctggggttgttccctcctccaccgcctcggggtcaagtcaccctatatgagcacaataacgagctggtgacgggcagtagctatgagagcccgccccccgacttccgg

SEQ ID NO: 10947 - DNA, 1432 bp, Homo sapiens
cggacgccagggggtgcccccagctccagcgcagaaccccgccccgcacaactcaccggatcagccaggccgtcgaagggcaccaggtctcagctaccacgacgctccgctcgacgggtcgcagccatgcaggagtggcagaggctgcctgacgaagccctccttgggggtcgatgcctctctccgggtgggaaggggcgctgtcggtgagggctatcctggcgccggcctgcgccgtccgaagtcgggggggaggggaggtctccgttcagcaggggtcacgcccgccccggacgggggccgcgcgggcgctcaggcgacgcatcttcgccggggcccgtgatcgccacgtccggcgggcggcgctgcgcctcccctcggggccccgctcaaggctgcagctcggcccgcgccgctcccagggcgccctctccgcccgcgctgggagcccggcggccgcggcccctttcgccagccccagctgcagcctgtctttgttgcttcctctcgctcgcccgcccgcccgcggcttgcagcccccgggttcgccccgaggtggagggattgtctccttcgggggttgcacgcacccgcagcggccccggctcctcgccggacatacaccggcccctgcaggttgcaaagaacagcggcgagaatgcaccggcccctcctcctcctgctctgagccccgggtgtggggggaggggaagccggcgaacagcggcggcggcagcggcggcggcggcggcagcgggcgacgcaagctcggatgcagcctcgggggcctcggcgctgagaaacagccgatcccagtggcgcaggacggacacgaggacggcccgggggactgtgcaccgggtgtgcgagctcgcaagccgcagcaggggccgcgcgcgctgggctctcacgcgcccatggccccgggcggcgcgcgggggctcccggggccgcagcctcgcgccgtctggcgcgcgccggcgcctcgcctggtctcaggcccgggtgccgcgcgccgcgccccacaggcgccgggcccggctgtccgcctcccccggccggcgcgcgcagcctctccgcggagcagccggccaggcagtcctgcccgctgctccgctctggcccgactgacaggcgcgagcgccggcagcagcccccgcgtctcgtcccccgcccgccccccgcggcccagcccaatcagcggcggctgagaggcggttaccagggtgacgcggcaccgcgtcctgcgaggggcggagccgggggccgccacgcgcgcttttcgcggcaaaattcaaaggccggcagggcggctctccaacctcctcccccaagcagggacgaggcggaacttgcctcgcgaggactgcaactcccggcatgctgcgcgccggcgccgggtggaggggccccgactgggggcgcagggcgt

SEQ ID NO: 10948 - DNA, 325 bp, Homo sapiens
cgctgccgccgctgctcctccggcttccttgtcatcatccctcacgccctgcagccctgcctcctgttcacgggttgccaagccgcggcctggccggtggtggcagtggcggagttagacaaagcccccgcctcccccgccccagagccccccaggcgccccaagtggcgggaaggccgccagctccccaggccccgcgctctttgtctggcgtgggggtggggagccgcgcctggccccaggagcttcctggcctctgccaacccctcgctcctgcacactgcgctcattgtctgagatgcgccgagacggccttcgctgacgt

SEQ ID NO: 10949 - DNA, 1242 bp, Homo sapiens
cgctcacagacaacgctctcccgccgctggcgctggtccgggatgcggccccgagacccctgcagccgcgcgctggctcaggggacctccgcaggacgcgggcgggcgccggggccgggtcgggcttgggcagagtgacaggctcccagtcgtgagcctcacaagcagatctatttacaatatcccggataggagtccaggtcgcgtcgctcgcgtcgcccgcggggacccggcgtgaattcacacgctcccctcccaccgcctcgccgcctgtcacggccccgagacccggtcagccccttcgggggttcccttcgccgcgcagtactccgcccgtgagcagcccccgcctgcgctcctccctccctagggcggccgcctccactcccggctcccacccagcggggatccaccagggcgagggctgaagacctcgcgggacgccgcgcgccggggacagcgacgcacctaccttcccagccacctgggaggctgcaggtccgggccggagcccgaggctcaggggcgcgcggagcagtcctggttaaggcgcagggcgcggggttgcatgggggtccagtccagcgtgcacaccgtgcacctcccagcgcagggctccgcgctctcccgtagcccggcaacggccgccaccccagagccccgcccactaggagccccgctcagggcaccgcccacccgggccccgccctcaccgcggctctcgccgtggctccgcccccgtccagagccccgcccccagcgcacactgcgtcagccggacttgctctgcagctgggttctttggaggcccccactccgcggctactgaagcggatgagtgtgaggctgactgggggcttggggatgggggaccggagaccaccaagaacatggctgtgttgggaaactttccttcagagcagagagggagggttcctttccgccggggtgttccccacctttcagcctttcccgcgtgggcccgcatcccagccagaggggatacggcggccaggtctgcgctgctgcgcctgagctcaggtcggcagaggtcgcagacctcggctcctcagccggcagggactcgcaggtgcgcgttcccacggacgcctcccggggaagcccgagttcgcctcctgcaggccgggaagcactcgccccgagacggccgcaccctcgcagcggaagggcgtctgcaccacagctgtagcaccagcgcgtgcgaggcggggccagggccgg

SEQ ID NO: 10950 - DNA, 1460 bp, Homo sapiens
cgcgtctctgctccctcccgacctagtcgtaaattccgagcctcagcggccgccctctctctcctccgctcttcttgacccaaggtctcaaaagacaaacgtgtcacttcccgccccgcccctggatcctggtcccgaccgaatgtagtggggaccgagaagcgcaaggtccaggacttgttagaggggcgcgccaagggcgcccctgttccgccaggacatcaccgcctgggtactctacttcaccctcccgcagccttctttggggccgggcggggcggggcggggcaggggggccgggcgcggcctacgcgccccctcgagtgcgcggtgcgggacgggcgcggttgacgcgctcccgccggtgtctgtgcttctccgcaggccaggagggcatcctgcgctgccacccggacctggcgggcagcgagctgcagcggggcacgctcacggccgagtcgcagcgggaacagagcggcgcaggcctgaggagcctgggcgcggacgagcggctgcggctggccgagctcaacgcgcagtaccgcgcgcgcttcggtttccccttcgtgctcgccgcgcgcttcagcgaccggacggcggtgccgcgcgagctggcgcgccggctgctctgcccgtccgcgcaggagctgcgcactgctctgggcgaggtgaagaagatcggcagcctgcgcctggccgacctcctccgcgcagaccccgccaagctgtagctgccgcgcgggccagggacccgggacgcacaaccggacgcgcgggggccacggcccggagctgtgcgtcctgggcgggaggcggactcgggcctggaacagcgtccacacacgtgcacaaaggaagtggagaattgaggcaatcatacgagtaatgagtccttttgtccgcccacccacacgcgcacgcgttgccaaaatatccatattgtttagtgctttgccccggatttatccagctcactgcttcaattcttcactccctttgcggcccccgacaccaccggcctttgtggattccaaagcgtttatccagttctccccaaccctctcctgctaagcccgaactgcaaagcaaaacggacggaaaaggaatcttttatgccacagcggtttgtctgtttttctcttttcccacttcatttgctgcgcccgacctttacatgtgagcggaagcggtgttctcgctcttgggcactaggggagcagactgggagccaggaaagtcaaacgctggcctcggtccggcctggggagccggggaagccgcaggaaggaggcggtgggccgggaagagccctgcgaagggaagagccaaccgaagggttgggaaggcgccccgtggggacggacggaatagttgcagccatcgctcctaaaaggcgggaggcgtccagctaaagatctctcccggaggtcggctttgggggggtggctcgactgccccgg

SEQ ID NO: 10951 - DNA, 1064 bp, Homo sapiens
cgactggcggctgtgtggcgatagcgcacgcctagttcctggaaagctttgcagtccatcaggagagtctccggggcgcctccctctctggctcctccagggacctgcgggtagtggaggagttctccatagcgaggcagcgcgcccaagccggacaggatgcccacgcggcactcctctgtctcgggctggaaggcgaactccaggctccgcgcgtccagggcattgctggtccccagcagctcttccacgaccagaggcaagttccgagtcacaacctccagctgggtgaagaccacctccacctccagtaccagtggtagcactactgcccctccgggcgcgtcatagcgcagctgcagccggacgcggtcccgagacgggctgcgcgcgcccaggtgagagtagcgcacctcgccagggccaaagtcgcacgggaagcgcttgggactcaggcggcccggtcgctgggccagtgcgtcgttgtctagtaccgaaaccgcgcagcggtccccgggctgcacctgcaacaccaggtcatgcaggggatccagccagacttcacggccgaaaggcacccggagtccgcggttcgccagcactatggcctcctcagcagggacccctgcagcccccgcgagaccaggggacagcaacgccctgccgaaggcagcgggctgtgccgggacgcggcttaccagtgacaggagaagcagcagcagcagcagcagccggggcggcggtggcggtcctggttgaaagctggtggagttgcctgtccggcgcgaggataacccgggagtcccggctgagtgcatggtcccggtgttcgggcttggacaggtcagcctgagagcatgcgaagtcggtccccgggcagacaacaagagacaccgccgggaagtgccaggaactccgcgcgttgcccgcggggtcctcctgtagccggggctgggccagaaggatggcaaagttgcgcggcgccgtccgggctggagccgcagccgaggagccgaagccttcccaggccgtccagctccgccgctagcgcctcaatcgcgcgg

SEQ ID NO: 10952 - DNA, 622 bp, Homo sapiens
cggcctgccacgcgctcccgtcggggcccacccgcacctgggccggggctggtgtccacgcgcgacggctcgggagcacggacctctgctccccgcagcaccgccccccgggtggagccggcggccccgcctcgcagagctggggctgtacctggggcaacggggccgggcctggacgtcaggtcggaggagtagcacctgccaggagcacgtcccgccggcaggtcgcaggagccctgggagccgccgccatgggtacgctcggcgggtggggggccggccgggctaaagactcggagctacgcggggcgggggccggcaccgagggccgggaggcgcgaagggtacgcggcggcgggaagcggggcgacccgaaggcccacgggggccgggaggttgcggggcgcccgggatcccctcccgggtggtcaccgtgcggccggggcgcggaagccagaggtgcccagaggcgccgactccgccgaggttgcgatcctggcccgcccgcccgtggggcactgtaatcctcgtattcccaccctgcgggccgggagtgcgcttggagcgggacgggacccagcgggtgacggcaggggcggcagaaacaccgtctaactggcgg

SEQ ID NO: 10953 - DNA, 1622 bp, Homo sapiens
cggccccaccgggctgcaagggccgggaagctgtgccgggggcgctttagaggccagagccagggagggggcccgcgacacaggcgggtcttccaggcgggcccagggccaggacagcgcggcatcacccggccagtcctctgcagccaggatgaaggccggggacagacgttcagtcctagaccctccagacagggctgggcagtgccggtgggtgcctgggagaggcggaggcgggcgcacttccagcaccaggttcgggaaggacacggtgcccagccgctggagcccctggcctgcgtgccccaccctgattttctggcatctggtgaacggcccctccgcagggtgggggtagccaggggatctgccgaggaaagctggggacagcgggcttggtggcgcggcccggcgcggcgcgtgcctggggcgcgtggccggccacagaacccggggagggtggaggctcccgggcacgcgccggggtggtgggcagcccgggacggcagcggcgatccgtcacctgaggaggggcggggacttcatcgcggccaggccgaggcgccgagggtcccttgcggcttccgcccctctccgctggccccgacgccgcgctcgggccgggactcgagccccggttccgcggggcaggctcaggtctgcgcgctgcgcctgcagccgaggcagaaatccgtcccgaggcgcgggcgccgggtccgggtcccaaggatgcgcgtcgggctccctcccgcggggacagccgagctccgccggcgctccaggtgttcccgcagtgcgtccgggcgcggacgcctctctgccctcggaggggaagcgggagggcccttggggtaacgccccgacctcgggcttcctaacctgggtcgacagccggctggcacagggaggcctgcgcgggagaggggcggagagagcgcagcgcggggcacagcgggcggtctccgtgccgcgcgcgcgactggaaacggcgtgcagatcctaaaacgagggttccacagagggccacgaggggcaggagagagtccccggagaactctagctccccgacacggctacctcttggcaaacgagcgagaattggggcgcagagccttgggagggccgttccctcggcgggagcggcccgagcacagcctcacagcagatgcgagcgcggcgggcgctttggtgacgaagtagcgggacctgcaggaggcagaggcctggtggggccgtggacgccacgccgagctgcccagacccttccagaagacagtggggactattcaacggtttccagcagaaactaagccaggtgttcgttttacggagattgctcggctgcagggtggaggctggatgagaacaggcgtcctctcaggtaggcgctcgtggtggtaacgctgcccaggaggagggcacgggttccgggaagacttgcgaggttaaaccggcagctccggagaactgagcgcaagaggtcggtgacacagagaggagtccgggaggccgcatgtttcaggctgaagtcacttggcggggacgtttattgagatgcgaaacacaggaagggatagaggctgcgcagagggaaaaggcgatggactcggttttggaaacgc

SEQ ID NO: 10954 - DNA, 324 bp, Homo sapiens
cgacctcccgagggaggagacagcgccgccctcttacctgcacaggtgctcccgtcgtaggtctcgcacacccactcatggcactcacacaggggcccgaagaacatgcccggctcagtcacgtggcagatgcagacgccgcagtcgcagcggccccggccgtggcacagcgcggcccccgggggctgcccaggtgcgcggcagcgtcgctccgactcggcccgggacagcctgcaggcggcgcccggccagctcctgcgcgggcgacaagcaaccggcaggccgggtcagacgcggacgccgccccctgctccgaacccacgt

SEQ ID NO: 10955 - DNA, 1881 bp, Homo sapiens
cgcactcggttccgaagaaggcgtccctcggacaaaaccgaggaatctgtcctgctctgtaaggaactagggcttgctgattcccagattttaacgagaatccctgctccccgtaggcgctccataaatttttactggacaacttcaccgcgcgctactgggcctccgggagacccgtgactcccacccgctctgggcgcgggcccgcagagcctcaacccgcgcccccggcagccgggattccccgcccggaccggctcccaggctggaaacatcatggtccgcacccggggcgcagccgagacccaccgcgccggaggccccgggacccgctcagaccgctgcttggccactctacgcccctgagccccccacacagccagccccgtgacctccgagccccgtgacctccgagccccgtgacctccaagccccggaagccgctgtaggcagcggcccagccaggccccgccccctccaccggagctccacgcgtcaattccagccaggccccgcccccggccgccccaggcgtggacccaagccaggccccgccctctgcctggctactccaggcgcccaccgccccaggcgtcctctagcccaagcccaatgcccggctgctccagacgtcgacagccccatgccccgcctcctaatcggctgctgctggcgtcctctggtccaggctccgctccctacccggctgctccaggcatcctctaggctagaccccgccacctaccggccgctccaggcgtccgcagctccaagccccgccctccgcccggctgctccaggcggcctccggctcaagccccgccccctgcccggcggctccagaggtccgcggctccaggccccgacccctgcccggctgcacaaggcgtcctctgggccaggccccgcccccagcccggccgctccaggccccgccccgccccctctgtgcgcgctccgctcggcagcctgtgggacgcgaccgcggcgctagtctcgttcctttgtgctgcggcggcggcttctcgagtcctccccgacgcgtcctctaggccagcgagccccgcgctctccggtgacggaccatgtcggcggcgggagcgggcgcgggcgtagaggcgggcttctccagcgaggagctgctctcgctccgtttcccgctgcaccgcgcctgccgcgacggggacctggccacgctctgctcgctgctgcagcagacaccccacgcccacctggcctctgaggactccttctatggctggacgcccgtgcactgggccgcgcatttcggcaaggtgggtgcgaacgctttaaggcgccattttccccggctgtccagtgggagtcggggaaagcgggtctgaggtgcgggggacgtggggcgtgccgggatcgcggggcggaagcgggatcgacggcgcctgtgccccgaggggcctagggcgcctgtgcggcagcgctcgcggcccggagtcgcggcggggcagccggggggcgcggggcggaagcgaggtcggtggcgcctgcgtccggaggggcctagggcgcatgtgcggcggcgcgcgtagcaagtttctaacaaggcgggctccaagggtcccggcgcctgttggccggatcctgtgcgagcgcgcgcgcgcgcggatggtgcggggccctccaggccgggccggaggcgcgagcgatttcgcagagccgggtattaggccgcgaagtcgcccaggcggcttccggggagccgagctggggtcagaggcgcgcggggaatgcccgggcgcggtcgaccttctggttccgcacagcctcgccagtagccgagggccgcgctgcggacgagctcagccgaggagcaagcgccccggcgggactggaaggccccgg

SEQ ID NO: 10956 - DNA, 944 bp, Homo sapiens
cgtttatagggcgccgcggcggcgctgcagagcccacagcagtccgtgccgccgtcccgcccgccagcgccccagcgaggaagcagcgcgcagcccgcggcccagcgcacccgcagcagcgcccgcagctcgtccgcgccatgttccaggcggccgagcgcccccaggagtgggccatggagggcccccgcgacgggctgaagaaggagcggctactggacgaccgccacgacagcggcctggactccatgaaagacgaggagtacgagcagatggtcaaggagctgcaggagatccgcctcgagccgcaggaggtgccgcgcggctcggagccctggaagcagcagctcaccgaggacggggactcgtaagtggcggaggcccggggctgggggtcgtcgggagggcgggacgcgcgcggcctgggggtgggaggcgccgggcctggagcccgagccgggggaccagcgatgcagccgggcgggcgccgcggcaccccggggctcctgcaccgccccgaacgctgcagggctgcagggccgcgcggggcaccggcccaactcggaggggcggcggctgggccctggtggatggcagcgtcgccacacgccccctccccccagacccgtcctctaggccgggggcggggcggcagcggggacgcgaagtccccggttgcataaggcggggcgggagtttctggccgctggcgggcgccgagcagccgggaggggaagtacagggcgttccgagctggcgggagggcggggcggtctggccggcgcccgccggggccgcggggggaggggggcggaaagtccctgggcgcctgccaggaacactcagctcataataacctcgcggaaaacaccgcggcctcggcctccagaaaccccggccttgcgcaatcccccgcagcccgcgcctccctgggccccacgcgg

SEQ ID NO: 10957 - DNA, 1514 bp, Homo sapiens
cggagccgaatccggtgctcctgttcgcctggggctccgccagcgcgccgtaagctcctccagaaacccaaattctgcaggccgcacccccaactcgtatctcacccaggcccccgtctggcgccgatctgccccagctcaacctccggctccgcagactaggcactttccgggacgcggggcagaccctgcgctcgggtcccttcccgcagccgggctgtccggcctctgcgcgcgcacaacaggcggcacggcgcagcccccgggagcgcgggactcgggtgctagtcccggcgcccagccacagcgacacagacctgggtgccggggcccgccagggagccctgtgatccggggacctccgcgatgcagagaaccagggaccgcgcacggagcccaggcgcgcagtctgcagccaggaccagcctcccgcccccgccgctgaagccgccccgagctccacgcctcccccgctgccgggctcggctgccctagggcctcgtccgcccgtcccagagtgagcgacctccgactcacggagaagcgaccttaccaccggtgcccgacacccagagctaagggagcgagaagaaggcgaagaaagaggcggagagcggtgcactgccttcgctgggactcgcgacttccagaaaccctcccgaaacccagtcccgccgccgccccgccggcagggggcacagcgggcgtccggggcgcggcggctgagcgatggggcgagcggaaagggcccagacgcctggttcttgttcatacctcggagaaagtcttgagcaccaggcgttgggctctctggtcacccctctgactcttcctaccggcgccgagcctgccccactcctctcagccccttggccccgccagccagaggggcgctccgcgtccgccccgccccccacccacgcctcccgacccgacccgcccccccgaatccccgccccctgagaccccgcccccgacccgccccaactggccgcggcggcagccgagccgcgggagctgcgcgctgagctcgcggcagtacggggagcgcccgcccgccccgccctggacccaaccaagcgtcccgcggaggggtgcggccacttgggggcaggagaaagcggagtacgccacccctctagggacccaggaagcgaggcgagcctcaggtggacgcggtggtgtggaccacggcgatcagggcctttccccctgctgtggagacggaggtgcgaggggacgccggcggctccccaccttctggccgagtggccttctccgcctccggctggactccctcggggcgctccctccagagccgagtcgggctggccgggggcggctgtttggcctgagtgtcgtcttactaaagcggaacgccggaggggaggccactccgagagaaggcggtccccggcggaggtggcttcgtgaatcctgcagccccctgcccgcccgccactcgagacgccgcgcctcgtgggtttcacgctggatggagggggcgccgccga

SEQ ID NO: 10958 - DNA, 2144 bp, Homo sapiens
cgcgtctggatgcgtttctcggattcggctccacacaagcctcagccctccggaccttgcacctcccccgcggatctcctcacccctccacccccaggcccagatctttccttgtcggaatcgccacgcttcctcactcctttacccccgccccactcggctctcctcttcctggtcctcatccggccaggctgccccgccctggtagttcccgagggtcgtccgaggctctcgtccaccaaccgcccccgtctggaagaatgcgcccgctcgagcgcactctcggcgggtgccaaagcctcccgcctcaacaggtgcccctgcctggccacgcacagctctgtcacctggggctcggacggagacggcgacaggatcgccccctgcagggcggctgcggctccgcacgcccccgcccgggtccccagagcgccaagggcccccgcagccccgccgccgcccccgctgtgccacactgcctttgtttccctgcccgcttagatgtcgcgaggctgacttcatgcaagggtatcgccaagttcgggcgctgacactgcccacctacccgtggtggcggaccctaaggttgggagtgagagacgcgtacagtgcgagacctctcctcaacccagagaactccggggaagctgggtgtccgcgccgaagaagcgggttcaagttgacccggctcagaagggggttcgaagccaggcgcagcgcctagagagccttcccctacccacgcccccacccgatgtcctctgcccccagaaggctggagaggggctgcgcactgccacctacgcgctcggctgcgagtggttcccaccgcccgctcgccgcgcgctgggcccggcagccttccggggcacacgaggctcccgcagcccccagactcccggccccggcagcgcagagccgggagagccgccacgttcccagccgcgcgcgcacgccgggcccaccaaacttgcagcactttctcccagcccccaccctctgtcaccctcccttagtcggtgcgccccagccccgccgcccggcagaggttgccataacaacgggcaggaatgctccaacatatacaaagccggcccggcgcagcgggcactcagccctggccgggccccgcgccctcggccgccgcgcagggtctggacgcgcgccgcggctccctagccggccggccgacgctcggggcgtactcacaatgagcgggatggtgcggtcctcgcggagctgctccgacctcctgcctgccctctgcgcgccccggccgccggaggatgctgcgtgggctcggttgtcctgccataagtagtagaaagtgcccaggatccaggctacggtcaggatggcgatggcattggcgcggatcttcctcatggtgggcagacgggcgccccaggtgggggactgggccggcgtgctctcggggccggggcgggggcgctcgcagccccagctgtttgttttcgctcgcgcctagctgctcagtcctgcagagcagaaaaaggagagaggtgggggggcgggggggtgatagggagagacaggatcgcggagcgatcctcacggtcctaatgcccttcagccccgagcgcgcgcgtcccccgggcgcccattcattcgtgcgcagggccggccccgcgctccagccgccgccggctgacccaccaggccactgcgcactgggagagaagcgcgccgagtgggaagcggcgcgggccttcctcccgcgcccgggaacccggcgagacagacgcccgcggcggaatggcgactggccaaagccagcctcggctcccaccgctaggtgaccgaacgcccggcagctgcccccgcgcggccctggtcggtcctgccgacccacacccacccccggaccgagcggccttgagtcaccgactggagacgcgcgacccccgacctgggcccgcgccgcgagctgcagttccgggctgcgctctggcgcgggattcaaggtgtgttcggcgagtccttgtgtaggggcggctgggcgggggagagtcctgagtttgtactggaatctgcagctgagattagccagaccgggcccgcccagaggagggattggaagctggtgcacttgacattcgaagagcgcgaaggggaaacgacgc

SEQ ID NO: 10959 - DNA, 379 bp, Homo sapiens
cggtgcgggctcgcctcctcccagcccagcttccctgacatcgcccctttcctggggacgttgcctgcgggcccgcgcgtccccgcccccgactcccctgcaggttcctccgggggccggggcaggaccgcactcaccgaggacccgggcgctggagccagcagcagcggcacgagcaggagcagccgcatctcagcctgcgggagacgcattgggttagagcggcccggggctcccgcagctgtcctgggcgcgggcgagagtgtgtgggcgcgtctctccctatggcccacaggtgaccaggagacccgcaacaggacagccgggtgcgcctcggtgcaccgcagagaacacagcgtgagggcgccccgccgggcgg

SEQ ID NO: 10960 - DNA, 637 bp, Homo sapiens
cgccgccccactttcaacaagccgaagcctttgaaggaggctcggtgccatctcggtgtgatcgcgtcccggcgacgctgggtagggtgcagggagccagctcggccgcggctcagcgggaggggagggggccggtcccgaacccgggcgcccgggccgcgggtgattcactgggaacgccaggttcgcgcgcctagaccggcgggcgacgcccagcgcgccccacgtcccccgcccgggccgttcgcgcagaagcagcccccgcgcacccctgctccccgagacggacccgtcgggaaggagcctggagtcgggcggccggcgggcagcaacctctccctcctcagccaccatggccggtgcgactccctacccgcgcccgcagacggacttcctggaaagcaccgggctgggcttacctgactggcgcccgcaggggccgccgacctcttcacagacccacggaaactgccggccgcaagccgaggctcggttcccagcacccgccggtccgcccgcgtcggcctcccaaagagttgccagacccacccgccagcagctccctcactcgaccgccctgtaggtgcggtgggttcctccttcgcctccgacgcgcgtgcgcactcccgtgccgcgg

SEQ ID NO: 10961 - DNA, 959 bp, Homo sapiens
cgggagtggggcgggcaggaacgagggcctgagcccaggaccgcaatccccgtgaggggctcgaggaccccagcccaacgccccgccgggccccgccctcacctcctcctccatggcgagtccgccgaggtcccgccgctccgccactcgcttccagcgccgcgcgggctctgccaccgcgtctacgcccggccaggcggcgactctccgcgttctgtcccgccggctgccgggggcccaagaaacttcgggggggcggggccgggggcggggtgaggcttccgggggccggggcggggccggggagggggcggtggggccgggggcccggcccagggcgggaaatgggtggggaggggcggggcctgggttggagactggacggaggagccgggcggagatgcaactggaggaagagggcgggacggggcggagaaggtttcccgcatcggcggagggagagggactaggagggggctgcggcgggggaggagagggggcttccggcccagagactgaggcgagggtggcgggagcggcgcgcaggcagggctggggtggggcgcacacagtgagcgctgggggcgctggcggtggagcctttgaggtctcccgaaccagtgggctggggttgcgagaccgagccgagctgccctgggcggccagagatgtgggcacacagaggctcctcctctttcctccccgacgccgggcagtgggcggtggcctggtcttctccctggaacctctgggcggggccgggcctggagcttgggtctctgtccggagggtggtgtcacaggaagagctggagctgagagtcgggactccggggtccctttagggggcggcccgcccctggctctcaggggtctccaagcgcagtgttctcctgctctccttgggcatcgctcaatccctcccgtatctgagggtcgaccatccccccgatcccgcgg

SEQ ID NO: 10962 - DNA, 826 bp, Homo sapiens
cgcccatccctgcggcgccgtgaaagaaggcgcaggaggagggagccctgacacctcctctcgggctggggccccacagcggcgaaaagacggagggagtgatcgggggtcgcggggatccttccgggacgggcctccgtcggaggagctccggaaagccgccctccacctccgaggccccgcctgcgcgggcgctccactagcggtcggggtggtggcggcggcggcggcggcggcggcggcgcggggcggggcgccgcgacccctgtccctcccctgggccgagcggcaggcgcgctcgcaccgcccccgccccctcgtcgcagtcgctgccgaccggctggctgggccttgcggcgtgaggaccccggcggcgccgcagtcccgcgagccatggcccagtccggcggggaggctcggcccgggcccaagacggcggtgcagatccgcgtcgccatccaggaggccgaggacgtggacgagttggaggacgaggaggagggggcggagactcggggcgccggggacccggcccggtacctcagccccggctggggcagcgcgagcgaggaggagccgagccgcgggcacaggtaggcgcggcggctggcccgggaggtgggccccgagggggcgccgggccgcgcgcgagttcggggcgctgactgcgcgcgacaactcctcgggcagagggggttgagtcagccccgccgccggggaagcagctccgggccgagcccctgagtcagaaccggcccgtggaggcagccggtgccccagcccgcagcttcgtcgcccaaccgaggctcccagggctggcggccgg

SEQ ID NO: 10963 - DNA, 2156 bp, Homo sapiens
cgtccgaggaaccggcccaaccgctccccgctgcagccggcttgtccctttctcggaactaccgagggagaggcgcgtgcggaggtcggcgttcggatctcgcatccgtcactgttgccggcgcatttcctcgaagtcttacctcgaagggctgggtcccacccgcgcgccctgtgcgtgtctccctgtttccccacgccctccttgcctggctgctgcgaggctttgcaggggaaagactggcgcggggttcgcaccctgcccatgtcacaggaaaaccgtgggagcctccccgacgcggcgcatttccggaagccccctctccaggagggttgcgggaaggccgggactctgcatccagacgaacccggtcgcctcccaagaggaaagtcggagacccagctgaggggcaaaaatgccagggaaaggcgagcccagagcttggtgatggagaaattgggaagccaccccccacccttcaatcttaggatggggaattcgcaactgaagccggagcttcagacttggggcgcactcccagcttagcccaggaaagagatttaagggcgcagcagtgtggatacctctcaccccggccccgaaggtctagcgagggtctaacctgggccccttgccaggcccgccccccgcccctttccagcccccggcccgtgcgccgctgcccctttaagaagcccaggtaggcaggcccggctgctggagccgctcctatggcaacccgcgagctgcggcggcttcatgaatattccggggcgcgggagcccgagcgctgccggagggcgcttcgggggaggcggccgctgatgtaagcccggcgggtcgctgggctccgctcggttgcggcgggagccccgggacgggccggacgggccggggcagaggaggcgaggcgagctcgcgggtggccagccacaaagcccgggcggcgagacagacggacagccagccctcccgcgggacgcacgcccgggacccgcgcgggccgtgcgctctgcactccggagcggttccctgagcgccgcggccgcagagcctctccggccggcgcccattgttccccgcgggggcggggcgcctggagccgggcggcgcgccgcgcccctgaacgccagagggagggagggaggcaagaagggagcgcggggtccccgcgcccagccgggcccgggaggaggtgtagcgcggcgagcccggggactcggagcgggactaggatcctccccgcggcgcgcagcctgcccaagcatgggcgcctgaggctgcccccacgccggcggcaaaggacgcgtccccacgggcggactgaccggcgggcggacctggagcccgtccgcggcgccgcgctcctgcccccggcccggtccgaccccggcccctggcgccatggacaagctgccgccgtccatgcgcaagcggctctacagcctcccgcagcaggtgggggccaaggcgtggatcatggacgaggaagaggacgccgaggaggagggggccgggggccgccaagaccccagccgcaggagcatccggctgcggccactgccctcgccctccccctcggcggccgcgggtggcacggagtcccggagctcggccctcggggcagcggacagcgaagggccggcccgcggcgcgggcaagtccagcacgaacggcgactgcaggcgcttccgcgggagcctggcctcgctgggcagccggggcggcggcagcggcggcacggggagcggcagcagtcacggacacctgcatgactccgcggaggagcggcggctcatcgccgagggcgacgcgtcccccggcgaggacaggacgcccccaggcctggcggccgagcccgagcgccccggcgcctcggcgcagcccgcagcctcgccgccgccgccccagcagccaccgcagccggcctccgcctcctgcgagcagccctcggtggacaccgctatcaaagtggagggaggcgcggctgccggcgaccagatcctcccggaggccgaggtgcgcctgggccaggccggcttcatgcagcgccagttcggggccatgctccaacccggggtcaacaaattctccctaaggatgttcggcagccagaaagccgtggagcgcgaacaggagagggtcaagtcggccgg

SEQ ID NO: 10964 - DNA, 1441 bp, Homo sapiens
cgtaaggaggaaaacgtggaatcgaatacagtagctgcgggaccgcaccacgtgatcctcctcccgcggtcgctccatagaatttgtgggaaggggggggagggggagtgtcgccgcaatcccgaggacaggtcagcagcccgcgggtccgactccagccggcgttcccggggttaccacaccccctcgccggcggggaaaccatactccttacacgcccgaagtcgccgccccctcgacacggctcgcccggtcgcacgcacacgccacgggccggcgcctcccggcacacgcgcgaaggccgggccccgcctcgctccccaccgactccgcggagcggcgaccaccggcctcaactagccccggaccccgggcgcgctcgggccggtcccctccccggcccagcccccgctaatcgggggatccattccgctgaactcgcccactcgggagggcgcgccttcgcctcactgctctacacccgagggcaacagcggtcgtaccgctcacctgggtcggggggctcctccctcgctctcggccgactgagccgggctggggccttcgaggaagcgcgggccgccgggcggctggaagtgggggaaggagaggagggggagggggtcgggataccgggagccgcctcctttctcctccgccgactgcggctcccgcaggctggccgggcgtcctcgcacactcgcccagtttctcacagcctcgcgtcccgtcagcttctccctcaccccactcccacacactctcactcccacacactcacacccggccgctcctcgttccctcactcgcctgccgcgcgcgcgcgcgaccccgctcacacacagcgcgcgcgacgccggcggagaccgccccgctccctcagaccgaacgccgcccgcccgcttgctgaggagcggcgcgcgccccggccccgccctcctggcgccgcggcgcggcgggcggggggcggcggccggaggagctgggggccgggccagcgcgccgagcactgccgagcggatctgacacctgcgtcgagagccgccctcccagctcctcgcccgcacccgagccatcgctggcctcgggggaagagaggcgatggatcgcgcgcggggagcgaaaagggagcgcgagggcgctccgaggacgcgcctccccacccgcccccaaaccgtcttcactgagaaagggaaacggatggggggggtggggggcgaggtttgctcccaactcgaaaccgcgagattagtcccttccgttgtacgccctccccgccctcacattccctgcttaggccccatcaatctgcgcctggaaccccgacacgagccccctaccccctcgggcgcagggtcctgccggcatcccgacgcctcccgcccagcccttccgccggccgccgcccggagtctccgcttacggtggttcctccctccgg

SEQ ID NO: 10965 - DNA, 734 bp, Homo sapiens
cgggccccgcccgccctgtctgcgggccgactccgcgacgccgaccggctcgcgcctccgcccccgagcgccccggcgggcggagttgcgggtgaggggggggctggtttggggggcgggggtcccgatgacggcatcggagcgcgccgcactggggatggaaacctgactgcctggcccgggacggcgcttgcagccaggcaggtgagtgtgggccggagagcgggttaggggcgaggaccgggtgggtggagggaggcgcgcgctccctcctcgcgcaggcctgggcctagtggccctgggagccggcactcctgggagacctgacccggcatgaggagcccggcacccttgctccccagcctcctggaagctcttccttggactggccggcgccgtcttcccgacatctgggggctgaggccggcatcccgggcctgcgtggaggggcgagcgccaaggctgcgagagtcgggtcccgatttgtaatcacttcttccaactttcatggagctccgtcccgcgcccgccgcctccagccccagctgccctgccccggctccgaatagcgcctgcggggttgtcagagcaccttcggagcgggagcgctgtgcggagagcaggggcgcgcggaagccgggactgcaccgggctcggaacgctcacgcggaggggtgcgcgaaggcccacacggtattgcgaggcagagtttaccgctgtgtgcccagggtcgg

SEQ ID NO: 10966 - DNA, 935 bp, Homo sapiens
cggcggtgtccagggggagagggtcccagcgccgccgcttcccaagccgacccgtccgcacctggtcccttccccacagggctggagcctggatgaagtcccccacccctgccagaccccagccggggggtcggcgccgcgaggtccccatgcgcgcccccaaagttgccgcgggggaggggctactccccgcccggggctgagaccagccgagccccccgcccctgcccggcccgctcacctcgggcgcacagcgccagccggagcagctccagcagctgcgcccccagctcgcacgcgtccaggcccagcatggcggcgcgcggcccgggcgccgcggagccgccgaggagccgccgcccgccccgccgccgccccgctcggcgctcagccccggcgcgactgcggtgagctcatcccggccgggagcgccccccgcgcccagccgcgcccggcagagagcccccagccgctccggaccccgcgcagccccgcagagacgcgcgtgtcgcccgcacgggccggcacccgggtcgcccccgccggcgtgccaggaccccgcacagaagcgcccggacgcggacgcacgcagccgcggtcacgatccccgccgcccgcccggcccgtgcccggctctggccagcagggctgccccacccccacggcgcggcgggagcccgagggggtctcctgggaaaccctctgcggggcgccgtggcgcaggtgcgcccccatccccagggtctcattatccgcggccacacctggggccggaccgcgcgcccccttcccctcccccgctcctgagggagcttctgtctgggccgagggggactccgggggcctgcccagccttggggtgaggggctggcccaacaccctacaggttcacggtcatcagtagggcgggaccacagtgggcgcgggtcgcacgc

SEQ ID NO: 10967 - DNA, 1054 bp, Homo sapiens
cggggtgggggatattcgggctgagtcagtcaagccgggagtgtgaggagcagcgggggccggcaggaacgtggacgcgagattggggagcagtggggctgcctgtgcggggatgcagctcccaccaagcacacgggtcgagggctgaccacaggcagagcagcgccttctggcagcgctgcgggtgtggatgagggaagccaggccccggacccatacccagacggccgctcctcagcctgtcccctccctcctgtgggctctcaaagtgcggcttggtttctccatctcgaccctgaggcctggaggtggggacgggactgtgggcgccggcaaacgtgagctcccgagcggggcgggaaaggagccccgcgaatgcctcccccagccccggcgctccacgtgcaggcccatgactgggagcgttttcaacctaaatcggcactgcgccgggattattcctcccctggcgccgcccccgccgcctcctccggatccttcccggcttctcccccactcttcgcccccggggcccctccctgctgagcgggggctgccgggatttgggattgcggggctgccccgaccccgcagccgtccgcggtggaagccagcccgggcctggccctgagcgcgcggctggggcggccgctgtccatggtgctggcgcgggtggcgcgccggccggcggggtctgcggaggcccaggcgtccctggcggggaaggcggcgcttccgggtctggggagcgagggtccccgctctaggggcacggaggatatttagactggggcgcccgtgggcctggtgctgccgcctcgggcgccggcatcctgcgatatcccctctccccggctctgggagggaaccgaggcagccccgcgccaggcctccccggacacctggggcaaattcgctcctcagagcctcgtgttccttccccaaacctgaggtagcgacccctccacccctaagggcggccgtgaggtcgaatcatgtgccgaccccagccggcccttgcaaacgttgtgatgtcggcctccggaggccgcgc

SEQ ID NO: 10968 - DNA, 1474 bp, Homo sapiens
cgccagcgccgatgctgctgtctccccgctccctccacttccacacactcccacccgggtctccgcgggctctccgaaccaagccctcagcccagctttcccaaacagcccacacagcgacacgggtattgggcaactgtaaccagctccaaccggaagtacctgcctgtgggtgagacccacctgaccctcggggccggccgccataagggcgagggctgaggacctcccgtgggggacatgggctccccaccagccggaaagctccagcgaccggctgggcgttcctgggccggacccgcgccgccgcccgcgcactggggccttcgaggtgtgatgtcacctgcccgcagaatcggcccccctcgcgccgcccccctcgcgcccccaccccagcctccctctcgccgctcccggggctaatatggcagcggcgccgccgccccacccccgcaaccgcacgacccggctggcagggccgccggcccggacccccgagactcacaccccggccaggcccgcacgccctgcgccccggacccccggcggctccccgcagccctcggggcgccgacccccgcccgctgtcacacgaggcccgggcgcccccgacagctcgggattacgtcagagtgacgtcacacaccggaccccggcgagctgcgggcatgagcaacgcgcgcgcccccgcccccgagtccctcccgccgccgcgctcaccgctgaagaccatggcggccgaggcgcccatgacggcgaaaaacgaagcatactcggggccgctcttggactcggacatgtctgcgggtggggagggggcaagctctgcgggccgaggcggtggcggaggcgggggcgaggacgggccgggcacgaaggtttgcgggcgggcggcggcgaaggcgatccggcccgtcagccgctgcgctctaaataccagcaccgcagaacaaaatggcggccgcggccgcgtcacatgacctgggccccgcccctgcgagccgtaccacttcgcaccgtgggggagacgcgtccccgggacgcccggccggcccgttgacctcccccgggctgtgccgcccgcccagcgacccggccccggcgcccggccccgccctgcctcggcctccgcgggtgtttccgggcgccgccggcctctggatctccgcagcgttggaccggtctcgcgccggggcggggcggtgtggtgtgtgcttcattagcatacggggcggggcctcggacgccccgcctcctctgcggctgcgcgtcgtctgcaggtgttgggttcccggcgacgcttttctttgtacccctggcgtgaagctgcaggccgtggtttcgcggccttgcccccaagacggggcctcacccctccgggcgctggtcttccaggatctccctaccaatcctgggcgagctaagggtcccagcagatgtgcggcgcgcgggcctcctctgccacagcgtccgg

SEQ ID NO: 10969 - DNA, 357 bp, Homo sapiens
cgggagaccccgagatccccggccggtgacagcaggcgaccccctgctcctgtcaacctgtgggtccctacggacgtggggaagggaggagggaggccccagctccctgcgggggaggggcgtgaagacgcgcgggggtggggggagatgagccggcgtcgccatgacaacgaggccggtggtccggccttggggacccgggagggagggaggcgccgtggccgcgcgcgcgggcgggggcggggggccaggtctcccaggagtagttggggaacacccggcgattctggcggctgcttcctggtggcgcagggagcccgcgtgtttgcgagtgcgtgtgtgtgcgaagttctccgg

SEQ ID NO: 10970 - DNA, 814 bp, Homo sapiens
cgccgtccaagagcctggggccgtggggggcggggctgcctgctatcggccccgccccgccgacaggacccgcctctctccccaggcccggcggggccgaccccgcctctcgctcccagcttgccgtacgacagcggcggcgcggcgggcggagccgggaggcggggaagcagtggccgtgtgagcgtgaggagctgccgccaccgcctgctcctcgtcctcctcgtcctccggggccccagcgtcgtgggccgcgcacggccctggaagagacgtcgcctcgccttcatccgcctctctcaccgcgccgctccctcgtcctgccctgcgggctcaggcggaacccggaacggccgtcctcttcccccgccctccgccgccgcctcctcctcctccttctcggcttcctcctcagccccgggccggagcggggtgtcggcggcggccggttcgggcggcggcgcttggccatgtcgtgtcggggaaggtaatgagccgcagagccccggggtctcggctgagcagcggcggcaccaactattcgcggagctggaatgactggcaacccaggtgggtgaccggcccgggaccccgccccgacctcccgggctccgcctcgggcgggccgaggcctagggccgcggggctgggaggcgcggcctaggccctccacccaccggagccgggcgcggcttcctgggtctcctcctccccggctaggggaggaaggccgcggggaggcgaggcctaagtgcctctcccctccctgcttgttcagcccggggctgaagccgagccccggggctcccggcgg

SEQ ID NO: 10971 - DNA, 847 bp, Homo sapiens
cgtggtgagacaccgactccgcagagcagagggggcggcggcagaggggaagggtccccgcactcactcttcttgcaggaggtgcatttgcatccctcgcacttgcaggagtccgcgcaggtgcaggagccacctagagagggcgacgccacaggaagggttaatgtggacgaactcgggtccccacgcctgtcacgaggagatggggtgccaagtctccctgttctccgcgacacaggcatgcccgcccttcacgaggtgaagaatagggaatcaggggcccttcccccaagtgtccttgagcgaaggcgcagggcgtgggtttctttgcaggtacaagggcgcgcagtgcgcaggatgcgagcgggggcgggggctcaccagaagggcaggggcaggtctcagggtccatgtcgaggagagcagcagctggaggcggtgaacgggcttctccaagcaactggacgcgcggcttggctagtggcagcaggtggcgatgcttttatagcctcgggcgggggcgcgcatgccaagcccgctgggcgcccgcccctgcgcaccgcgcccgctctttccgtttgtgcgcttgggctccggcgcacgcactgcatctgtcgcccgcccctgccgtgtgtgtgcactgccggggcccgctcgcccacgcccgcgcgtgcgcccccactcccaccccgcatccgcgtgcacgacccactcgccgccgctgtgcgcgcactgccagcccactccccgcgtgggtcccgcaggggacgtgctcgccgcagcagccgccactgcgtggaagcgcgcacgtaccatctccgaaagtggagaaaaaggcgctttgcgt

SEQ ID NO: 10972 - DNA, 589 bp, Homo sapiens
cgtgggtgctccggaggaaacggccgcagccccaaatctcctagtctctctagcagggagttttcccgcggagtctcgcctggcggccggaagccacctcaagccgcccacccggaagccgtcgtcttggcaactgggtatcgtcccacccccttttcttagcaacgcctatcgccttagacgtctgaggtcagccgagcctcgattggttcctctgtctttcactctgggagacgtttgagacccagcgtctctagatctcgtatttgaatttgtggcgcttggtgtccgcgagttgccgaatgaagctgagcgtctcagtggaaccagggatctcaggggtgagcgaccgcgaggggagagcgacgaaaagggcggccggagctggaggggcgcggagttaaacaaaaaagggcggccggagctgcaggggcgccgagttaaacacgtcatttccagatggggggcttcaggcgagctgcttagctcccctgaggcaggccctccgtctgttcgccttttcgtagcctctgagtttttccctcacgtcgttttccggcagtcccagagacgccacgcctgcccccgt

SEQ ID NO: 10973 - DNA, 848 bp, Artificial Sequence
  Description of Artificial Sequence: Synthetic polynucleotide
ayggggtygtattygagtyggyggagtatttttagggagggggygggaggttttttttgtttagtttygagtyggtggtgtagygttygttttyggtygygggygtagattggyggtygttttygggttaygtggtgygygyggygggygygttygaggagtttgyggttgtttttggtttatagygtttygggygaggagagygggyggaygtygggggttgggtyggtgygggyggygaggtaggyggaygaggygtagagatagyggggyggtyggggygyggtagtyggyggygtyggggtygyggtttttgttttgtygtttttttygygtyggattttygygtttagggygtayggtggagagggaygyggyggagtyggtyggtagttatggaatyggtttttttygtyggygtygagttgtagttttygtttttygttaaygtttyggaygtttattttagygtttgttttagygttggygttaatgygtyggggtygttaggygygyggagygtttygtttttygttttggtaatygttattatygygttttattyggtygtgtgygtygtggggttgttgggtaaygtgtttgttatgttyggtatygttyggtgagttygttgygggtyggygtygtagggttggagttyggggtgagggtggggattaygaatttgagattttaagttygttttttggatttttygygttttygtattttttgtaggggtatttggggtttagygagaggygaggttatttatatygaggggaatataggaatgtgtgttatygtgtgtatgtgtgtgtgtggtgygggggggggagtgygtygyg

SEQ ID NO: 10974 - DNA, 1230 bp, Artificial Sequence
  Description of Artificial Sequence: Synthetic polynucleotide
aygtagtttygagtttygagtttygtttygggggttttatttygttttttygygttygyggttygtttttttttattgagygtttagttttygtagttttttyggtygtygagygtygtgggyggggttttagggyggyggygtttygyggggagggtttttygtgttgggggygaggttattygaggtagtttttygttygtttttaatttygtttygttttyggagtttataaagggaggygattygyggttygttyggttggtattttttagtygtygttagtttygtygaggggagttagygtygtttttgaggggygttyggygtyggagttatgatttttygtygatttaggaagttgtagtagaaggaggaggyggyggttatttyggatttygtygttyggattttygattyggaagtygygttygtygtttyggtttygatttygggattttttgtygtagtygttatttttgggtttttagyggaygagttgtaygyggygttggaggattattattttgtygagttgtatygygygttygtygtgttygggggtattttgtttygtygaaaggtgygtttttygttygtttttaggatttgtttagttttttttygattttttatagggtttgttgatttygtagtgtttttttttyggygttygyggagttttttattttttttttyggttygttgggtgtttygatttttygygtttttygttgttgygaaggtygtggttttygtttgtatatygygtttaggttyggtggtttttaatttygygttttatgtaygttttttttttttttttttgattttttttagtatttttttttttttattygttttatttggttttttgttttttatgtttygttttttygtggttaggtgttttgggtttttaggagtttttygttygagggatagagatagttttaggtaagttgaaggttygagagttttyggtgggagaagygggtyggtggttgygtygygtgygtttttattttgaggaagtgygtggggagtygttgatttyggatagtatattttttygaggggatttttygatttttgggttgggggtttgtygtttggttttaygtttgaygtayggggygygagggttattgttttttggatttttgtyggaatyggaygtagtgggaggggtygtagggygttygyggggtaggaaggatgygggtygyg

SEQ ID NO: 10975 - DNA, 1094 bp, Artificial Sequence
  Description of Artificial Sequence: Synthetic polynucleotide
gyggygttaaaaatagttggggggagggtgygggggyggyggagtttgtaatttaagtygttttagttttyggggggtagatttygyggtygtyggtyggygttyggtttttttagtattyggtttagggttggagttggttgtagggttggttygyggygatttgggtagggtggyggttgttttttttttttttatttygtttygaggygtagygygyggtagagyggttyggtgttyggygggygggyggttygggygggtttgyggtygggatgaggayggygttttygttgtagagygttggggyggygygggtygggagttygttggyggyggtyggygtggygggyggagygggtttyggagyggaggtgagtgyggatgygtygtttgggygygygyggtgtttggggatttygggttggaaygyggggygggggtgttatygggttgygygggggttttyggttyggttttygtttttgygttttygggggtygtttttyggyggggtyggatttttttagygttygyggygttyggttyggttttttygatttttttttttygggttyggaygtgyggggtagygagygtyggggttyggygggggtygtagttttgttyggagyggagygttggtagygyggggttyggtttygtgggtagtttgggaagygttygggtaaygtattggygagggtygyggagygaggggttyggggagygggattttygggyggggttgyggggagyggggttygggtygttttatttatygyggatyggagtygggggtgttttagtygtgtygtygtttttttygggtygttygttygggygtgttggtttygyggygtttygagygyggtataggtttgygagtyggyggtgttagygtttyggaygggggtgggagttttggagtttattttgggggagattaygtygtattttygtttagtttygygtatttttagaggtttttgtagagtygggaagttggttggaygtttagattygtggggaygyggygtttygygtggyggyggtyggaagggaaggttaatggggttygggggattttygyg

SEQ ID NO: 10976 - DNA, 1979 bp, Artificial Sequence
  Description of Artificial Sequence: Synthetic polynucleotide
tygttatygttatygttttttttttagttattttttatattygttygtttattttttttttaatattttttatayggttgttygtatttttgttttttttyggtttaygygygttttttgtaatttygaygtttttaggtttttagttygtttttttttttyggttyggagttygagagtygtttgtttttattttaaaatagygataataatagggaygttgagaataataattaygattagtayggygaaggygtttttttygygggttagaggtyggygttttagtttygtagaattyggygttyggttagygttttttggtagtttttttyggtagttttaggtttttaagatttgtaggttygtttygaagtttttygttygttttttayggtygtttygagttttygaggttygtttyggagttttttgttygttttttayggtygtttygggtttttayggtttttaggttygtttyggagtttttaatyggttttttagagtygtygygggttttyggttatttaggttygttyggagttttygttygttttttayggtygatttaagtttygtygattttttaggtttttttyggagttttttatgggttttttayggttatttygggtttttaaagattttyggttgtttygaattyggattygtaggttygtttygggatttattattggttttttaygatygtttygggtttttaaagattttygtttattyggtttygattttttaggttygttyggaggttygyggygtagtttygtygtyggggaaggtttgtaggtygtaaggtygygygaatgtttygtgttygtttygattatygtttttagattagyggygttttttatygtgtttygagggttgygyggtttygygayggtttagyggyggggygygggygttgtttatgtagttygyggtygygtttttygggtygygyggttygagyggtaaggyggyggyggyggyggygygggttygggttyggtagagttgygagggayggygggaggygagttygtttttygggygygtttayggttygggygagagtygyggttttyggtgyggaygttattgatggggygtttggtygygggttyggyggyggygttttttyggttggggttttyggtttatygygtatygttttagggyggtttttggttttaggatttagyggyggttgyggygggagtyggtygtatgagaygttttygtttattggttygtygtattygttatygttattggttygtttyggtyggtygtaggggttgtgtaygttatagygtygtgagttagtgygttaatggagtgaaggagagaggygggattgatagtttttttggyggttyggaggygggattaggaggaygtttyggtaaygattgggtagggttttgygtaagggygtatgygatattggaagtagygagtaattggattggttgttttygtygtaaaggagggtgggttttgtattttygggtttgaygattggtttttttaagtgtyggaagtaatagggatgtygtttggaaataaaatttggtattgaagygtagggagataaaaygtttatttttagagtygaggyggyggttgtttgtygygtgttygtggttttttgtttgttttyggatatttygggttaygttyggttyggttttyggtygygttgttttaaygggygttayggggtatgaagagttttgggyggttgygaggggagggtatyggggtagyggggyggtygttyggggttttygygyggtgatttttgttttgtygtygaagagaayggttttygggygygtygyggtygyggttttagagtttttgggtttygygttttgagagtttgagtygtttgaggaggttaagygtttaygaatygtattttttgttttgttagttagttttttaataygygaaaaaggtagayg

SEQ ID NO: 10977 - DNA, 1930 bp, Artificial Sequence
  Description of Artificial Sequence: Synthetic polynucleotide
tygtttaggtagygygttgtttygggtttyggtagggtggggattggtygygaaggttagagaaggtaatggtaggggaggttagtttttgtygygggtyggttgtagagyggaygtttygttttgttttyggtttttttttygttygtygggttygtygtgtygaataattgttgttyggagttttygtgaygyggagttttaattgttgygattyggaagaagygaaaaggagtttttttygtttygtattttgagygttygggygtgtaaaygtgggtggyggagagyggttgttttttttttttttgtttttttttttttygyggygttttygtgtgtgygggtgtgtgagtgygtgtgtttttttygtttattttygtataygtttyggtattagtgtaggyggygagtyggyggtttttygttygttygtttyggtagttgygttttygtttygtttygtygtygtygtygtygtygtygtygtygtttttgtagtygtagtygggtatggtgagtgagtgaggtttagtygtygygygttttttyggttygtygtyggattttagttttaatyggtttygttttagggagttagtttgyggygggagygygttgyggggtygggyggttgggggattygggyggtygagttgygtttggaggggyggttygtgygttttyggttttaggygygtagggtygygggatttygttttgggagygggttttaygtttttttyggtttygagttttttttttygagggttgygygtatttttttygttygtttgttygyggttttttttttgttttyggagygttagtygttttatttygtgatyggtttttygttttgtttygtaggattygttyggaygggattaygtygtygtygtygtygtygtygttyggagtygygtttygggttttgtttgagtygagtygygygyggggtygtagttatygtyggygggggatggggttgtttaggaggygygtygagttygtagggggagygyggagtyggygygtagtttgagagttygagtagttygygtygggtyggttygtgygtatygygygtygtygtygttattgtygttygygtttygatggygttatygtttyggagtygttgatygtttagygtttttagttyggttygygyggygggtttttygagttyggttygtygggggagyggtttgtygyggaagttttttygygttttttygttyggtttygttatggygttgyggygttttttgttgttgttgttgttttygttggagtttttggatttgttgtttagygtttayggagttygyggtygygtygttaatyggattttgagtgtaggyggygttgtygtygggggtyggagggtygggggygttttggtayggggyggtygygagttgaayggtatygttygggygttyggaatttyggaggygggaagtyggygggggtagttygyggyggttgtggyggyggyggttagygyggtygttatttaygagaygtgttggggttattaygaygtgagyggttagtaygataaggagttygagtgtaataatagygagagyggttatttgtattgttgyggtatttgttattatygtttttgttgtaagaagygttaygagaagttggattagygttagtgtattaattattagagttyggtgtgggtatagaygtttagtattaaggtggtgtygtyggggttygagaataagtaygattyggagaaggataagattaattttatygtttatattatttgyggggtgatygttttygttatygtggtyggygttttygttaaggttttttaygataaggtttatygttttttaygggagatgaatatttataggtgagagygtygygtgtygygygtttyggttttttygyg

SEQ ID NO: 10978 - DNA, 3177 bp, Artificial Sequence
  Description of Artificial Sequence: Synthetic polynucleotide
tygygttagtttyggggtttttattttggygggaagggtaggtygattyggtagattgyggtttttygggagggaagaaggtgttagaygygyggagtaattataaatagttttttttttttagaagayggtayggggtttaagatttaggygtygtatatttagaatgagagtagagattttygttaggaaaaaaaggtatttaggggatttgtttattagtatgaaatgtaaatgagttygttyggttttatttatataattttgtgtatggattyggygaaagggtaattagggagaygayggygtagtagttattttgttattttttttattttttttttttatyggtyggggygggaattgagaygattttaattttttgyggtggygggaggtgygygggggttgygtgggtggtgtagttttaggagagtgaataaygtttaggggtgatggttttagtaaagtgaggggtggtgatggaggttattygatttatttygtygttttttygtagtggygtaagygttttaaaattttyggagagggaattgattgatttattaggtttygtygtgtttatttttygtagatgttggggaagtgtttttyggygtttaattttygttgtttttttttttatyggygtttagtatattygyggygtttygttttygggtatttatagttttttggagtggygtyggyggtaggagagagttagagtygattgagttttagaattyggggaggtaggyggggtaagggtyggggtttgygygtgygtgtgtaygygtggaaagtataaatttaygagggttygttgtyggtagggttaaggtgagtgagtgaaggyggtagattygygaagttttagtttygyggatattttttttttaagttatatagggatttaagagaaattgaggtaygaagttggggggtggyggtggtggggattttgaaggtygagtygataaagtttagttttgtgttttygtttttttttatatattygagatttttataggtttttttttaggggttttygttttgtttygtagttttttttggggattygggttttgyggtttagygygatttgtttggggttaygtgtttaagtaygaagtttttgygtggagtttaygttttttaaaaggtttttaggggtaaagggatgaagtttaggagygttaatgtgaggttaggtttagygggttagggttaygaggttagggtygaagttttagaattgattygggagtatgattaataagtttaagagatttgtggaggttaygtttagattatgtttattttagtttttttygagtttygttygtttttttaagattgggtttttttagtttgaagttttatttttaggatatttagtttygtttttttttttttttagtttygtagttaagtttaattttagggtgggagattaattaggtggagatttgggatttygttttgggattttttggtgataatttttattttygtgtygtttgtttttttttttttttaggttygtttagagttgagtttygtttttyggttgttgtttaaattaggggtygtggataaaggatgtttggggtttgyggttttaygttaggatttygygtygaatattttgatttttygggttttttttaagggagttttaaagattttaatggttaataggaaagtgggttyggtttgggtagtagtttgattggttttagttttygggagyggatttaggggtaaggggaggggagaggggyggttttgggttttggggtgggaatyggattttagttgtggttttttttttgygttttygttygtattgttayggyggayggttaatgggygygyggttyggggtyggyggygttyggygattggttgyggggttgtttgggggyggggtygaggtttgaagttgaagtgagggatttagttgtggtgtgygyggggtttttygtygtygttttygttygttygtttygygtttyggtyggaggaggaggttgtggygtyggygatagttayggtagyggtagttatygyggyggttgyggyggyggtattttygtttttattttygttygggattgttttttattgttttttygtttttttyggatagtgagttygyggyggggygggggaaggagtygtttttattttttttaagtttatttttaaagagatttttttttttttttttygtygtttggygyggagtygggaygatgttgattttttagattyggttttagttgygtygygggaagagggggygttttttttyggattttygtttttygtygttgttttttttttygttygttttttyggggyggtttygtygaaggtagygtygaattyggtaatyggagtttgggygygaagygaagaagtyggaataaagtgagggggagtyggtyggttggttygggaagttttaggggygtaggggaagygggattygygtygggyggggtttttttgygtttyggygtttygygggtagtatgtttttgygggtagggggagttgggttgaattggttttttygggggtttagtttgygttttagagtttattagatgtgttttygtyggggttttygggttgygtgaggatattttttttgaggggygtygtttgttttttttyggatygttyggggtttyggttggttagaggatggaygaggaggaggatggagygggygtygaggagtygggatagtttyggagttttatgyggtttaaygatttgtygggggtygggggtyggtyggggtyggggttagtagaaaaggattygggtagygyggatttygaggyggaggggttgtygtattyggygttggtttyggtggtttttttttatttgagttaggatagtygttygyggagttggtgttttygtayggtttgtaatttatatttttyggggtaygayggttaggygyggggttagaagggggaygggtygtatygtygggggtygggggggaagaagatttatygttaggtgagtygaagtgagttyggagggtaggyggatggggggggggttgttagggaggggagggggtattagagtgggagyggagaygygagtaggtttygtyggtaattygggtttattttatttgyg

SEQ ID NO: 10979 - DNA, 2195 bp, Artificial Sequence
  Description of Artificial Sequence: Synthetic polynucleotide
tygttagtttyggtygttaagtaaatattttttttaggagttygagaagtyggtgtgygaggggaggaattagtttgaggtttatygttttagtaatttygggtgatttatagagtttagattttyggttgtygtagatygyggtaggtaygtaaataagtagttygggagatattttttttttttttagttttygtttttttattttgttattttttagttygtgattagttgttttttttttttttygygggygtttagggttgagtaaatatttygggtygttygtttygttattagttggtttygatyggygtatygttggygattttttaggtaattyggygttatgagaatyggtatttygagattyggygttttgtttttttttygygtttttagggttttggttaggtttaataattttttttttttttgtgygttttagtttttaygggtttttggygygggttaattaggtttygttgygggtttttaggattgygtattttatttttygygaggttagtagtttygggggaaggyggtyggaaaattttttgtttatygggttggataagtattagtttggattygttttttaatttttgyggtttagttttagtagatttttggggtyggaggggaaagggtggtaatttatagatttatttyggaatagggagtggggggtggggttggtgggaatttgattttttggaaaggayggattyggagttagagttaaygtgtttyggagygtagaggtttagggggtygygttaaatattgtatttyggggaataaaatygtgaaggttaattaggataagtyggagtagggaayggggaygtygggaggggagagygygtttygagttgggtagaatttggaayggttataggaaattygggygyggggtagtygggtygagggggatttttgtttayggtttagagtggtttggattyggtttaygygtgagaggagygtttggtgaygattttaygtaygtttggtgattggtggaggttttagagaaggatygtgygtgtaaaaggygaatttyggtgtgyggtgtgtttaygtgtgtaagttggggaggggagggggygtagaaggygtgataaagayggattttgttttgagtgtgygtttygtttyggttygtttttagygaattgtgtttgaagtgtgttttaygggagggttaggaygaaggtgataaaggttaggtgttttttayggagaygygttaaggtagtttygygygtgttygtaggygygttttttggaagaygyggtggggggtgygtagggttgtatttttatattaattgtttyggygaaggtygagtttagaaagtgagtgygygtgagtgtgygygygttygtatgygggggygtggtagttaatagtaataatttataygtyggtagggttagaaatttttattttttttattagtyggaaagtaygagtyggtttagtttggaggtgagtyggggyggggagggtygggtaggttttgtttttgtgtaaayggagygtaygtatttggagygyggygggygttygattagygttttgaatggaggtgatgtaayggtgatgtaggttttagtttattttygtygaaagtaaggagttttgtttggggataggttygygygagagygagtaatttagygygtttggtttagtttyggttttagggagaggtaggttttgygtttyggttygggtttygttattttagttaggatygggtttggtttagygtttygygtygygttttttttattttygttygtttttygtttggggttggagttggttttaaaygttgygttggagyggggtyggyggygagttttaggtaagggttgttgttttttygtttygtygttyggaagagtygggtygggayggyggggagtgggygagggtagaggyggggggattggatattttgygggttggggaygtygygttaatttygttyggtygttgaaagtttttaaattygagtyggttggggattgggggggtgggggagttyggygttgyggttygggttggagggaggggaaattattttataatyggggtttttaagaggagtttttttatygtttgtttttyggtgggagttygyggttattttttttygtgggtggygttttttttgtyg

SEQ ID NO: 10980 - DNA, 2063 bp, Artificial Sequence
  Description of Artificial Sequence: Synthetic polynucleotide
tygaggagtygtggaatggaggattayggyggygtayggagtatyggggaggaatygtggggtgygtaggygtyggagygttygggttyggttyggatygaaggtttgygyggtgaaggtgtggtgtttgtgtttyggggaaagggttgttttttygggggattgtttygtagygaggtttgttttgttygtagttgggygttttttggggagygattgagygtaagggygggtygggaggygygaggygagtaygatgttttagggttttaaggattygtgtgygtgtgygtgtgtaaagtggggyggtgtagggygtgtgtayggtaygggygagaygygygtyggtgygggygtygggygtygtygggygtaattatagtataaagttygggygtygyggggygttggttyggagaatttatyggaygygtagaatyggatyggtatttttttygttagtattttaaygyggagttatagygtttagggatyggagggtaggyggyggyggtaaaggatattaygtaagtttttaygtaattttttygagtagtgtaagtttttaggattggygygygtttyggttattyggagygygtatygttygtatttyggygygtttttygygyggtgtagggaattatagygygggygggtattaaggggaaaggaggaggygtggtttggtygaggagttaatgggtygggaggggygygygggggaggagtttaggtgtagagtgtygattggttagttygtttttyggtatgtagatayggtgggagttaygtgttaggggtygggaygattttttgttggaggttaaygyggggyggggaagggggygygagygtttygtttggttgaagyggggggaggggggtttttgttagttagagtaataagatggtygyggtggtagtttygtattttagygygayggtttygggagtygtagtygtygtygtyggtttygtygtygygtagttttgagygtygttygggtygttttttgatagggtagttttagygttygtygygttttygtygtygttatygtygtagtagtygtgggttygttygagtyggaggyggagggagyggagyggtttygygtttagtygttygtagttgttatygtygtygtygtygtygtttaggattyggatttygtyggagtygtatttygtygggygtgaggaggaggaygygtygyggygttgtyggggtyggatttggatttgtygggaygygtygtygtttattygttygygtygtygtygtagtygtygtygtygttygygtygggatttgagttygtggygtyggygttgagygggttttygtygttygygtattttygaggttttygggyggttgttygtgtygtygtygtygttaggttygygttatyggagtttygyggagtygtygtygtygtyggggayggagtttaggtgagygyggtagttygttygtttttygtygtagtygtaattttgtygggaggttygygggttttttgttyggtygagtygagtyggggygggygttggtttttagygattygygtgyggygttaggtttygggtyggtygggtttgaggggagyggygggaagyggtyggggtyggggygygtgtgtgttagtgtgagayggggttgtgtagaygttyggtgtgtattataattaaaygggagtggaatggagggttgaagatggatgtgtttttttttttttaaaatttatgtagyggtgaaattyggtttttttygggtagtttttygtagattttgtattggtgatggtaggygygaattygtygtgttttggtgtaggagttyggtgtygttgtttgggggaagagaaaaattyggggygtgttgygggtgggyggagaaggatttttgggygttttgyggttttgaaattaggtggattttttaayggtgttgyggattgyggagtaatgygtatgaggaaaaygagtygtataatatttgttttgttattagataaygtaattygagygtttggttgtygtttttgttttaagyg

SEQ ID NO: 10981 - DNA, 816 bp, Artificial Sequence
  Description of Artificial Sequence: Synthetic polynucleotide
gygttyggagtgggaggaggggaggygttgttygaygygtttttttaagttttygygttttttttyggyggyggttgttygggggyggtggttyggygtygtttttttygatygttttttttagggtttttttttygtgtygyggttaggttgttyggtyggyggygygttggaaatatgaagagaygttgtagttgyggtggyggtggyggttattgtagtttagagyggygtatgyggyggtyggggygggaygyggggtygggygyggagaagtyggggygggyggtagagaggtygggaygyggatygggtyggggygtttatagtygttygayggygtttagagagygygygtttygtagtttygygtttagttygtygggtatggggygygyggtagtygtttgaagtttyggtttggttyggtygtattyggtyggaggyggagggtagagygygygtttagttgttygggtattaaatyggagygyggygtgygggaggttttagagtaggattggaaatgttttggtygygtygttttttgtttagatatttgttttyggtttttttgttttayggtgagttttygagggttattygagygtttttagtyggyggaggtagttygggygtygyggagttygyggaggygtygggtttggatygyggtayggtttatattgtttttttggyggggygggttygaggggagtttygygtttgtygttttagttttgggagagggggttttgtttatttttygaggtttgggatygtttttttttagggygttyggagttttttgttgyg

SEQ ID NO: 10982 - DNA, 368 bp, Artificial Sequence
  Description of Artificial Sequence: Synthetic polynucleotide
tygttttttttatataggygygtygggaggtttygttttttggtygygygattygggtatttaygtttygygtagygtygyggtyggtttygygtagtagtattattygtattatttygttgtggtttatttgggaygygatttataggggygttgtttygttttgygggaagaggaggyggyggtygtygtgattggggygttyggttttattygtttatagaaygtttttaatattaggggtttgaaagygaaaatttygggaaggtattttttgatygtagattatattttgtagttgatttatatygtttaggaggtagtgagaaaagagggggtgtgtgtagtttayggaygtagayggtayg

SEQ ID NO: 10983 - DNA, 1411 bp, Artificial Sequence
  Description of Artificial Sequence: Synthetic polynucleotide
gygggtttttatttygtygttaggagttttttttataattttgagaatyggggtgygaagaaagaaagggygaaagggtygtttaatttttagagagtagttagygaaagattygaggggttttttttygtaggatttygaataattgtagtatttttttagttygyggggtttattaaggagatttttataaataatagtatttgyggygaaggaattattttygtaaagggtagaagygttagattttattagttaattatttagaygygtatygygattygtaagttygggtaygtttygttygggygtaggtagygggaggggtygggtaygttygtgggggtggtttgggtaygggtttgattygggggygygttygggaggggtttgggtttgagtygggggygygttygggggagtgggttgggtttggggygggggygygttyggaggtgggggagtttggggtgggggygygttygtgggggtggggtggggtgtttggttyggggaygygttyggggaggygtggtttgggtttgggtygggggagagtygggtgygtgttttgggtttgygygggggagygygtttggtgtttagatgtttggtatygagygggtgggggaygtygggttyggagtyggyggtaagtttttttttggtaggtaataagttttttttgtagttttgaaggygttttggttagggttattttayggttygggtttttagagtttttttayggtttygaattygagtagtttttggtttttaattygtttyggaaaggtygtttttttttttaatgtgtggygygtttygatygttttttattygtggaataaaagagtagttttygyggagygggtttagagtttgttyggattgttygatggttttyggttttttgagygtygyggttgtygggttttgtgttygygyggggggygggaaggayggtyggggtttttagtgygygtttygyggagyggygygyggygttygaattggaaagttgtygtyggygtttgtygtttttaygtygttttagttttttttygyggggygttttatttattagttaggagattgggygtagggtygtyggggygggyggggggtttattttgtttttgatttttattgygttgtaatygtagaatygtaaggtttgagatttgtgaaaatttyggtttatggtttyggtttyggttagtttygtygtygttttygttttttaggggtygtagaaagattttygggggyggygtttttaggtttyggtttyggtttyggttygygttygtttggtyggygggttgttttyggtgttgygggttygagttgggttggtygygygttttagggattttaggggtygygygygggaggagygygggggayg

SEQ ID NO: 10984 - DNA, 1487 bp, Artificial Sequence
  Description of Artificial Sequence: Synthetic polynucleotide
tygtttttgtatttyggggaygtgattttttttttaggttgattygtttttygttttgtygtttttaggtggaggaggagttgaygtatttttagaagaaattaaaagggatagaggaygagttggataaatatttygaggatttgaaggaygygtaggagaagttggagtttayggagaagaaggttttygaygtaygtgtgtagggatgygggagttygyggyggggttaggtyggagtttyggggtygggaaggyggggagagtygtagggggaggaggaagaggaggaggagaaggyggygttttttagygttttttttaaataagtttygaaaaggggtattttttagtagttgtggttagyggtgtygaygttaggtttttttttagyggtgttgaygtyggyggttyggtygggtgattttatygtttygayggtagtyggttyggggggyggggagaggygggggyggttttygygtaggtaaaggtttggggggtyggggygyggttgtgtagttttygtyggagtygagtttagtygagygttygtygttgttygtgygtttttgygttttygygttatggtyggttttaattttttggaggyggtgaaaygtaagatttaggttttgtagtagtaggyggaygaggyggaagatygygygtagggtttgtagygggagttggayggygagygygagyggygygagaaagtgagygtttyggtttygggtttygtattygtagttttttttttygygygttttttttttttttyggtttttygygttgttygttygygygtagttttygggtygtttttttaygttttyggaygtygatygtygatttatatttttgygttygtagttaggattttttatttttttygtygtttttttttttgggtttgggataggggagggggygtygttttygggtygggyggggtyggttaagygggaaatggggggatggggyggagggggtgagygattttygggtggagaagtggagyggygggagggggygtatygtgtaggtttygatttyggggttggygtyggggtttygggtygaggggaattygygatyggatttgtgggggagaatgaggatgaaaaygtggagtttttattgtttagggtttgatyggtygatagggatttygaygggggatyggggatttggggagggggtygtattttttygtttttttygyggtttttyggtttttgtttgtttttttgatygtttttaggggygyggyggygaygtgtttgttttaggyggygggggggatggggggtggaggaagtttagttttaagtygttygtttttttttagttgatttttgygggaatyggggyggygggattttgtttttttttagaaggtttygggaaygttggygyggggttttgaatttaygatygtttgagygtttgttgtgygttttygtygygagtygtagggttyg

SEQ ID NO: 10985 - DNA, 602 bp, Artificial Sequence
  Description of Artificial Sequence: Synthetic polynucleotide
tygttyggttaagttattttttygttagtaggtgaggttygtgaatagttaagttttttttggtayggyggaatygtagtggaygygtggaggggtttygtagaggagggatttttgtttgggatgyggggagttgtagttttttatttgtatttagtttgttagttgtaygtttgtaggattataattttagtataaagtaggattgtagggyggtgyggatttttggagggagatagygyggtgygtttttgtyggttatgttggttggggtggtgttttaggyggttttagtygttagttatagggyggtyggattataattttagtatataaygggagtggaggtggtgattttgagagagggtttgtgttgtgygygtttygyggggtatgttgggagtagtagtattttagttgttttyggtygttggtygtagggttgygggattataattttygtatgaaatggaagagagggtggtgyggatagtttgaggaaggtayggatattttgagggaggtatggataygttgagggaggtayggataygttgagggaggttayggataygttaagggaggtatagtagyggtgygyg

SEQ ID NO: 10986 - DNA, 628 bp, Artificial Sequence
  Description of Artificial Sequence: Synthetic polynucleotide
tyggtattygtygtattatagyggatgggtgtatgygggyggtgattygagttygygygggttgyggaattttttatttattaaygtyggygtygttatgggtttagggggttgggtgaggtygtgagagtyggygaggaagtyggttttgygggttyggtygatttygggtttyggttttgggttgygagggattttagttttygtygtygtgtaaaatgtatataaggttygyggygtygtttttgygygtygtgaggatatagggttgtygttaaggttttaggaagggttttgtagaygtttgtgggggtgggatygyggttgatataaaagygtgtaagtgggttttattttttttattgttygtttttattyggtttygaaaagtggtttttgtttggygttttatttagtgtagygttggtaattatagtagtygtaatttaayggyggaygaagattggaygtyggaagtttygtttaygtygttaygggaaygtttttttgygtttttygtttatggtttggggtyggttttygttttttgtagtattgttttttgggtaatgtagtttgayggaattygggtggtatttggagygtattttttgttttyggtgaggyg

SEQ ID NO: 10987 - DNA, 215 bp, Artificial Sequence
  Description of Artificial Sequence: Synthetic polynucleotide
ayggagggaygggtygtgtagtgtagtyggyggggttagggttaggtygagggygygaggtggtagtyggttyggggaggyggaggttgagygagyggtggtgtttgtggagttgtyggttgyggtggaattatgaaaaatagtaggtatyggagtyggtttttagtttygattaggggagatgggatatgataggtgygattaataygtagtyg

SEQ ID NO: 10988 - DNA, 2638 bp, Artificial Sequence; identical to SEQ ID NO: 5981
  Description of Artificial Sequence: Synthetic polynucleotide

SEQ ID NO: 10989 - DNA, 2172 bp, Artificial Sequence
  Description of Artificial Sequence: Synthetic polynucleotide
aygggatgtyggtttyggtygtttttattaattgatttatgatyggtttggttagggygttyggtagygagagygtygtygygtygttgggaggtagygttagygyggggaagaayggyggttggtgatttagtatygygtttatggygaagttyggygttyggtgaggtaggaayggatggtaggttatgtttgttttaggaatgatyggattttttatggagaggtttatttattttaggyggggygttgggttttagtyggggataagttygtagttgttgtgttttgttgtttttttgttgttgtttaatagtagtatataatttaaaaggggggaaaaagtaaaataaaaaagaaagaaaaaagaaaaggaggtagaaattataattaatgtattttaaagggaggaggggaagtgttttttggagaatgggaggtygtttttaaagagggtaaggygaaaaattagtaaatatagtygygygggtgatygtttttgtgttttgygtttttaaaaagtygtttttgaaygtyggttttagaagygagaggagygagtagggtttygattygygttygagttttgtygttgagttygaaatagatattttagttttgygttttaggaatttttttttagtttttaggttttttgttgtaaatgtgaaaggtttttttagaagattttttatttttttttttttttttttttygttttttatttgttttttttttttttttttttgttggtggygtttgtagttgtgttagattyggttttaatagggagygagagagyggaaaaagttttttttttttaaaaaaaaaaaaatttgatttaaatttttttttattagygttattaaaatttgaattgtaaattggttttygttygtygtttttttttttttttttttgtttygagttttyggagggtgtttyggttttaatttaaattttgttgggtttttttttygtgttttttttttttttttgttttaaaaygtgagygaattygttttttaaatttgtgtttaggygygtagggtagggaggatttagagggggaaaaaatggaatagagggaaagagagggaggggagagagagagagagagagagagayggagtyggagagggagggagygagagaaagygagagtttttygttatttttygtygtttttagaatttatygggygtttgttyggyggttttagaaggtygggttgygttgtgggttgyggggagtyggaggttttttgattggttttttgaygttttyggattaattgtgttgttgtataggygtggtttttataggtygagtgttgggggatagagttgagttataaaaagaaggtgtyggaaattgtaaygtygtagygtygtatyggtattattgtttgttttgtgaatatgttaatatgattagagggygggygggagttattggggagygygygygtatagagtygtttttaggtggtttatygagagatygttgtagtttttgagttygttygttygttttggtttagtttaygtttgaaatgttttagttatttagtyggggattgagggaggaggtagggttaaggaggaagggggagggagagagggagggagttagygagtaggygagtygggyggggaaggyggagagygygttygggygtygggtaggggygttygttttttttgtatttygttygttttttygatygtygyggtyggttttttttttagttttttttttttttttygtttygggygagtygggygggtggtygagttttttygygagttgttattyggttattyggttttataaaagtyggyggtagtygagaagygagygtygagattttaggtttgygtgttttttagttttaygtggagttaagtttygttyggtygtygttgaagggttttygagttygggtgtttyggtgttggttttttttgygtttgggttgggggagtataaggatgyggttatattttagtataygtatgtgtgggttttttttttattgygttttattygtagttatgtgygggtatttaaatattttyggtgtatttgtattygaataygygttaatatattgggattgaaatatatatygaaaaataygtatatataaataygtatatagtttgygyg

SEQ ID NO: 10990 - DNA, 2548 bp, Artificial Sequence
  Description of Artificial Sequence: Synthetic polynucleotide
tygggtgggtttygaaggygaggatggttagaatatgtttttygtgatattttttgtttttttttagggtygtgyggygagaggygttygagtattgttaatgtgaygygggtttayggtygtatygtggggggtagygyggygtygttyggggtttggttttggttggtgaggttgtagttyggygggtagtttttgtgyggyggygttttggtagyggttttttgggtgtttayggtagygtattgttttgtagggtaagtaggatttttaggttttgtttagttggggttttyggygttgggtttygtatttgtygggttgttyggygggygaygygygggaaaggtggtttttgttgttttttggyggyggtyggtttygggtttttttattttaaggygtygygttygtttygttaggatgttagttyggagggggtggtayggtygggygagttygttttttttgggaygggattttttttyggttygtttttygtgtttttaggtggagaaagttyggtatgygggyggaggggtagggttttygaggggtttgyggggtgtgtttttgttttttttgygttttagttgtygttygattygtagygtttygaatgagtttttgtggattgtgaygttggtagaggggtttyggggggagtaagyggaggaggtgttagtgaatygtattttgttttattttaaggtgagaaggtagtttttaggtttttaaggttgggtatygtatttttattygtgtttttttgattttgygtygtttttttttttttagtttgattygyggattttttataaygatttggttttggtgtagttgtggaygtyggtgagttyggggggatyggygygtttygtgtgtttgttttaggagttttaggagttttttgtyggaatygtttgygttatygygggttggggygtttttttygaaggtattgggygtgggtgagtyggygygtggtgggaagaattgggggttygaggtaatagagtgtagggaggtygggttgttttggaaaaatgttgtttgtttttttaaagggggaggaattaaggggggtggtgggaaggggatttttaaggyggggtttttgttttttaaatttgagttttttattttttttttgtagaygggtttgaggttgaagtagtgagagaggttygtgtttttttgtttagtatygatatttgtygaagagttttggggttygggttgygttttagtattatgttttgygtygggtatttggyggggggygttgattygtgttaggtatgaatttagtttgatgagaaaaggtyggttgagtttttttagggttattayggttttttttttttttaygtttgtttgttattygatttttttgagtttttttgtttttatttttaaaatggatataagtggtaagtttatatttgttaggygtaaggtaggygttatagggggtaggtgaatgtagygtttttttttttggtttygtagggtgattygggaggttttttgatttgttttgagtttggttttygttttagagaggttttgttyggagttattttttggggggayggttgyggggagttagggaagttyggggtttatattygygtggtagtgtttaaggattggttttaggagtagatgagyggtgagygttttttttttaatgtttygtttttagtgttttaayggataatygtgggataagttygtttttattyggtttatgtttatttttagtttttttttgtttygggaaagtttgttttttttyggggaaggagtgagggggttagggttttaaatagagggtgagttgatttttgtttygttygtagtagttttttttagtygygagtttagttgtagggagtttttggtttgggattttttttaggagttgtaggtagaygtygttyggttttgygttttttatgttygtttgtgttyggggttttagggygtttgtgygygtttggygtattagtagtgtttgtagygtyggyggygatgyggttagttttgtttattyggattyggayggggggtagaggggagggggtttggttagtttttgatygtygtttygatttttgttyggttygtagagttgygttygttggygtataygttgttgggtttgttgyggaaygygtaggagttgttygggtttygttygggattgyggygtttggttttygttttggtttttttygttttagygtttagggagttttttttgtatttygttygggagttgyggttttatttaggtatttygygttttttagtttagtttagttttggttyggttttattygygyggtatagttatttttttygtygaggyggtattttaattttgtgtttttttaggatygygggttgtaggtattyggttttygaagyggaggtyggagtygygyggagaagttaayggtaatgaygttttttgtygatttttaggaggggataggttgagggtttggaygaggtyggaagygtttttattgtagtttyg

SEQ ID NO: 10991 - DNA, 919 bp, Artificial Sequence
  Description of Artificial Sequence: Synthetic polynucleotide
aygggagtygttgtagggttaggaygtaaagatttygaggttttttaggtygaggggaygtygttttygttttatttttgygttyggtaggtttttggtttygttagtatttgtygtttagggttggatttaygyggygggygggtgaggggtttttggygygyggttatygttygttttgtgttaggtgyggtgyggtagygggagygygyggagttygaattttgtaygtgtggtttygtygggtyggtygttgygagtttygtttyggtttyggttatygtyggggaggaygaygaygaygtggtgggggaygtgttggtattgttggtygygtttttggtttyggggtygygggygtygygygtggaggtygtttttttttgtygtttgygtygggaygygttggtggagyggygygygttgtaygagtttggygtttattatttggtgagtgtyggygygygggagggygggtgagttyggtygggygggagtyggggtgattattygtgtttttygtagttygaygtygagggtgtttttygtygyggttygggtttgaatttgattagyggttagtatagggygttygtggttggtttttaygttttygtygttaygttgtaygtgggtgaggttyggggygtgggaggatygttygttttgtygtttatttygtygttygttygtttgattaygttttattttttttygtagygttyggggagtygtygaggagggggtygtygygttttygggattatttgygtttgtttatttgtatttagtttyggtgttagygtaaygygtgagtgtatttyggttyggattttatattygtattygttyggtttttataagttggaggtggttaaataggtattggayggggttttygttygtttatattttatyg

SEQ ID NO: 10992 - DNA, 2488 bp, Artificial Sequence
  Description of Artificial Sequence: Synthetic polynucleotide
gygtagttyggtaggggyggtyggattygggtaaaygtagtttygggtgggagtagggttatttttgttttygagyggttggaataaaaatgyggattgtattttttttttttttttatttaaagtgtttagttttgaagataaggtggagggaggagagagagggyggaggtgtaaatttaatttaatttttgygygygttttygaggyggtyggttgttttygtttygtygtgtttttttattaaggaaggttttttygttaggggtygttaaygttygyggttttyggttagayggtgtatttgagagggatatttygttttttttygggagggattygggtttgttgaagtgggtttaattttgtaaatygygttttaatttttygygtygygtyggggaatttttttttgatatttaaygtttttygtttttatatttttaaatatagtttattttttttttygtggyggtygyggtaattygagttyggttttygtttygtygttagagaaygtttttttygtygggaygyggtgtygagttygttgtatatygagyggtygtggtataatatygyggygttgygygtataattatygttttttaggattygyggygygtatttygggagtggggtgygtttygygattttgggygtttagggttagatatattttttgggygtttygyggtttttatagtgtagtttttatygttttttttttattttygggtatatttattygtttttygttttagtttattyggtttagggygtagtygttttttygygtttttttttttagtttyggtaaaggaagttttttttgygtttttttttttagaatygtttttagtttttygtttttttaatygtagtttaayggtyggyggtagtagtyggagaaggggggyggyggttygggtttyggaaayggttygatygtygggattygggtyggatttygtatttgggttggaagygaggyggagatgggyggtygggattygygagtgagyggggygggyggyggtgatagttttatagttttagttgttgttgttgttgttgtygtygyggttgttyggggagaggggttggtattatygyggygygttattgttyggttygggggygggggtggttaggaggagggtttaggygagtagyggyggtagyggyggyggygtygyggttyggaggaagggggagggggtatygggtayggggaggygggagagggggygggatygggtayggggygggggygggggggaggggagygtagggagggygtaggtagggggagtaggaggagtagtaggaggaggtggyggaggggygggtgagagggaggagtgggtayggggggaaggggagagaggaaaaggaggtatttagggagaggggagaggagaaaggagggagagaggygyggggggagaagaggaggaaggagggggagttgggttaggtagggggggataagggygygttggaygygtygtygtgygtttyggtggggagygygtttttaagggggaagygtttygaggaagatttttgtayggggttgagttyggaaagaaggygttgggatttgtgtttatttatygttttyggaggttgyggtttttgggttyggtgggggttggggggagagggtattyggygggttgtttgyggttaggttaggagagggagatttggtttaaataaagtgatttaggtatttttaggaattttyggygttyggggttttttygggtagttttygatttttatgygtttttygggtttttagggaygygggtatttgtggggyggggttgtygggtttyggggttyggttttttygggyggtyggagygagatttygggttgggaaagttaggtaygtggtyggttttyggtygtattttygttttatttttayggtagggtttttagtgtttgattaagtttaagttygagtttttyggygygttgtttatyggttgttttttygygttttttttttttttttattygtatygtttygttttttattttttttttgttttttttttattatttagtttatatttttttygttttttttttygttttttgygggtattygagtgttygggaggygtttatttgttygatttaaatatttaygygatttttagygttygtygttygygtgttygttttygtttygtygtyggttattgtgtttygttagtttatatygggtygggttttgayggygygygagttatagttgtaaagtaataggataatttyggggaygtygttttagtttagattygggtaygtattgttygtggagayggtatygtyggggaggggagttaygyggattttagatgyggttttttaggyggatagatttttgttyggggygtaggaggaggtaggattggtatygyggggtgggagttttggattttygagtaatttyggattyggttyg

SEQ ID NO: 10993 - DNA, 513 bp, Artificial Sequence
  Description of Artificial Sequence: Synthetic polynucleotide
aygttgttayggtaaygattgtaygygtatttttggagggtggtttgyggttttataggtttygygttyggggaggagaggaggtggtygattagatygtgggttttygggtttttyggtttttttaggttttaaattttttttattagagattttgtttggagtttttatgttagygtttttttttatyggtttttttttttaygtyggttttagtgtattaygyggttyggygagggattgggaaygggatagggaygygttttaatttatttagyggtggagttggggggyggygyggttaygtgggatggygggtagtttaggggattygggygayggggtttggygggtagggttgttttagtygtttttataaagtyggttttttygatttttttttttttttgtagtttttttttttttttttgggggttgggaggggayggggygggaygttggtagtygggagagtggaaaaggttgtatagagtttygtgataagttyggtyg

SEQ ID NO: 10994 - DNA, 1766 bp, Artificial Sequence
  Description of Artificial Sequence: Synthetic polynucleotide
gyggatggtyggtttaggygygtttttttattyggggtygtttgtgttyggtgtgtygtgttygygggttaggggygyggygggaagttttygttygttygttagttagyggggttaaataggttatttttttgyggayggtyggygtyggagtttttttttygttygttyggatttattttygtaagtagygttggggttggagtygggyggttyggattagtttyggtttatttgggyggygttygyggtygggtttaygtyggggaaggtttyggtygtygygagttttygttygagtttygygttttttagttatttatttgttttttaygttttatttattagygygtayggtttyggtaattttattyggagyggggygtygtygtygtttttgtygtagttyggtygggtygttgggygtaggggatttygygtygtygttgtygttgtygtygtygtygtygtygttgtygttgttgtatttttyggygagygttgttgtttttttttttgtttttttttygttttttaaygtygtygttatygttttyggtttttttttygygygtygttttagttaaagttyggtttygtatttygttyggatygtttttaaatygttttagttyggtyggttaygttgttttagttagttttttggtayggygttatygtttttygttygtttgttygtyggtttttaygtaggggaggygggygygtttyggggyggggagygtygggtygggagtygyggayggttggggttyggggygyggggggtttagtygyggtgtttttttygagtttttygygygttagygtttttattttyggtttgggggaygygyggttygygattyggttttgtttgttttyggygtayggtttyggtttyggtttygaagtttagtttyggayggggtagtgaaygtagagttggggtttyggyggttttygatttttygatgttttyggattyggttggtygygttttyggygtygagygygtattttygtygggatatatagaygtatatttattygatatattttygtttttgttygttttyggyggagagttgaaatagatgtgggattygtttaggagttggaaaygagggagggaagygagttagagttttgtgtgtaygtgtgtgtgygtaatatataaattagggggtatygttaataaattaaatatygtgataaatttaggagggttatygattaggtttatttggttggaaaygaygtgaatttgtttttttttygtttttttttttttttttttyggagttggagggagttaaatgtttygyggggagtgygatagtttyggtygggygtttttttygtaatgataygttaataaatgtttttttttatttgtttttataggattygtttyggtttgtaaatattygattgtttttgtygaaagtttygygttygtttttagttatatatatttgttattggagaggtyggygtyggtygygattygtagtttaatygtagggtaaatygagttgtttgtgygygttygagaatttttygagaaattaatttyggtttaagtgaaaatagtagttgttgtttagaaatggttygggagtagtatagaaaggagaaatyggtttttttygaaaggggaggaattggatttaagggggtgttgtttatygtggttttygttgtttttygygttatagaagaggtyggagggggatyggtttgaygygggtgggtaaagagyg

SEQ ID NO: 10995 - DNA, 6511 bp, Artificial Sequence
  Description of Artificial Sequence: Synthetic polynucleotide
gygatttygggggttagtagagaggagaggttgygggaggattygttgygaagggygaggggtggygttgggtgggaygggygtttggggtygtgtagggtggtttttgggtgttgttygggttgtttgtygtttagtattggygtaggaagaygggttygygtagygtttggtaatagtggtttgttttaygtttggaggygattaagttttgagttaaaggygtygggtttagtygggaagtgtatggygatttagaatayggagyggagaaggttttaggggataygaggttatygttttagttttygggtttgygtttygagyggttagggtgygtayggatgggtttygggatgttagtggagaggtgataggagtttattattttayggttaagygtgtgaggttttyggygggygggggtttttttyggggtagggtagggggagagttaggtatgtttttaaygggttttttagtagaatygttaggaaagtggtttttaattttaggtatttttgtggtttttaggtagttgggygattaaaaatttatttttgtttgttgtgaaatgggataggtggttgttaggttagagattgtgtttaygaagtttygtttggygggtygggattgaygtggattygggtttttttyggaagtttgggaatttgtgagttttttagtttttygttttattttgtttgtttgaaaaaaggagttgtttgagaggaagagttaaggtttaaaaggttttaaaygaagagtatgyggtttgaygyggagygtaaagaagygagtagtgaattgaatttggtgggattgagattagaggygtttgtatgyggyggtygtttygygttttattaaagtaatttgttatttaygataattatttttgtaattattttggagtggttgtgatttgatgtttgtggtgttttagggtatgtttttattggatatagatattttagggtgttttttgaygttagtgtyggtttagtgggtgttagtgtygygaagggagggtggygggygtgaatgttttttttttttgggtttgtygtaggtttyggtttttttattttgtttgattttggygggtttgttatttattgaggtttttatyggygtttaygttgtttygagaggygggataaaygttyggygygtggygyggagtttgygaaagygttygggggtttttattttttgttygggagttttttttttggggygggaagaggagtygtagatttgttygaattttgttttattygtttggtygttttttttygtttggggtgggggtaggggtggyggatgatttaggtttggggtygggagttttgtttttaaaggtattatttygygtttttttggaagtggygygttgttggggygttttygttgttgtagaggtttggtttgyggttttataggggygtgggtttagggtttttagggagtaagtgagtttaggttttttagggggyggtagaggggaattttygataattttttatttttttttttaggyggttgygaggttttyggggttttagaggggtttttttttgtyggtgtyggttgttttgagygyggttaygtagttygygtttttaygtgggtaaggggyggggaygttggagggaggttgttttggatgttggagttttyggttttyggttttgttgagtagaaaagttgaagttaaggaagggttgaggtttttttataagggygygygygtgtttgggtgtyggtttagaagtygagaatgtgygtattggggaagggtttttygtgtygagaagatagaggatttgttttagttgtttttygtatagagggygyggaggttgygttttagttygaaygtttatttattggaaagagggtagygtyggggtttagggaagttttttgggaatgaatggtttttgttaagyggtttyggattttttgggttttttgggtttayggtayggtgttgygygagtttttagtgtttatyggtttttttygttttttgygtagaygtttttaggyggggaggtatatyggttttttygggtagttttggttagtgttgttgtgggaaaggagagttagggtttgggatgggggatgagtatttttttgtttatttygggttttagygtgtaggaggtaaatttgttagtatagataagatagtttgtttaagttgtattttaggtygggttagagaataaaatygagggttagaaggtttagaatgtyggatagtttagyggtattygttagggagttttaggygttygaaagaggygtygtatttttggygagtttaggatttatttttttggatttgtgttttggagtgtttgygggtttgggtttaatttttgtttttggtaggtgtttttttttttygtygttaatattaggagygttgtttttgyggtaatttattttatttttagaagtttgttttgggatygaagtgttagggttttgtgtgtttttttatgtattgttttttttagtgtaaagttttgtagatatgtttggtygaaaagttttagtggttttaatttttagattttgttttygygttyggtyggaaaattatttgggatttggttgttgtttaaggtygggggaaagttttttttggaggaygtttattattattatttttttttaggtttatttgggtttaaataaatgttaaagtttaaaygaattygagaaggaatagygaggtagtggatgtygttatttygtggatgggagagttatgtttattgtaggtgyggatatygtattgataggtattgattattgtaaaatygtatttagtattaaatagaaatagttttgttttttaatttttatagaatgtttaaatttagtttagggagttagttggggygttttaataaataygttttygagaattagygatgttttttttataatgaaagttaattgttgtataataattgggttaaagaatttygttagtttaaattttaaaaattagtattgtattttgtttttaagtttgggtggtaagtatygaaggggagagggaagtagygtttgtgtggaaggaagtttygttttttgtttaaatatgtgggatttgggtgtttatttttttagtygagagttttttgtaggtttttttttaattttttgtatttttttatttttattttattygtggygttygggttttatttttgttyggygttttttttttagggygagtagaggtttttgagtgatyggttygttagaggtagttgtagagtyggygtttygtagggtagggtagggtygggtygttgggttggtttagtgygygygggttttttttggttttagttagtygygggagatgttatttygggygatagyggygagaygtygttgttygtaatttttgggygggtaggatygtttgttgtttttgyggtttttggggtagattttttaggagttttttttttttttttttygttygggggtygggatygygttgtgtttayggagggaattgggygtttttggygtattggggttttagttgtatgattttagtttagattttaagttttagtggggtgtaggtgggatgggatgtgtttttaggagatgaggagatttyggttgttgagtygttttttaaatgygtagttttttaattttaggtgatattygttttttggaggaaygagtgaaggtygtttaggygaaagaggggtgggttttagtatttggatttttttttttagttttgttaattttaggtgtgtttayggtggaggtgatagaaggaaggygygtygggggatttaggtttygtaggttttyggttgttaaygaggtatygtttattgatttygygtttygttttttatagygtggggttyggygttgygttaggttygggtgyggggyggagttaggttgggattggttgggggtygtttygttyggygtttgggttttygygtyggttttyggggaggagttatgataattttttttttattaaggygttygggtttttyggttatygttaggatatattgttygggygyggtttttttygttygyggagyggttttgatattygyggyggtagtatttaygttygtagagtygtygatgygtgtttagtgattyggatagtaaggttygygygyggygggggyggyggtagaygtttggttatygtgatttygattttggatttatygtttgggggttggggggattttggatttaattggygattgttttgggggaygtyggaygttatgttgtggaaaataatygataatgttaagtaygaagaggattgygaggtgagttggggtttyggggtgtagtttygtttygtygaggatagttygggaggtaggggttattggatygaggtyggggaygagggtataggagttttggtttttyggtgggaygggatttattttttyggatattttttagtttatttttgyggggttttttttttgtatagggtttttttttaaatagttttttttygggaaygaggtttggaaagagaatggtaaattttatttatatagtttatygggygtttttttaagyggtaaatagttttgtttttygttttttyggaaaagtgtttygtttgtaatttttagaygtggtttttaygtaygaagtttttgtttaaaggggttagatgaggttatttgttagygatattttggyggatatttttttaaggtyggtttgttatttgtttygttattttttyggggaagtaygaaaataatygaagtttggtttttaaaagaagtgggggttggggagtggtggtgggggtgttygaggttagatggggtygtaagagttygygagtgttttagtttgtyggataggttgagttagagtttyggagagtgggagggaagaaggaggyggygagygggaagaggaagaagaygtaggtagygttaggygagtttaggggygtygggagygyggagttygggttayggattygygggagtttattgygttttygggttttggagggttgtttttgttygtaggttygggygttttygttaggaggygatagygttatgtttttttaggttttyggygtttygagatttttgggtagatggggaygtattttttagaaattgagtygggtygtttaggggygagggaaygtgygygggtaaggttgtttaatttttagggttttttatgttttttttgygtttygaygtgygagaatattgtttttggtagtgtagggygtttttatttattatttttttyggttgggttyggttagtagggagggtygttttgtgygygygttttttttttattttttagggyggygtagggtggygggttttgtttttygagygtygttygttyggaggtttttgtttygagggygtggaagggagggtttygggggygggggaggtgygtatttttygygtygygtattttattygygtttgtygygttgttatttttagtagtttttgygttatgggygggttttaygagatagttttgtatygggygttyggttttttygtttygggttttggttttttygtttygggtttyggttayggatttttttggtttaagatttagggttyggatttggygtttttaagygtttygggtttgggagtagygtttagattttygtygtygggttttgagaattygtttttttaggttttttattagattttttttttttttygtattttttgtttataaygaaattttyggggygtattgttttygggtatttttygattttgggtaagtttygtygggyggggtgyggttggtttttyggggttttttgygtagttyggygatgtyggttagttygtagtagyggggtttygtattaayggggttttttgtttttttttttttttttaggatygttaygaygggagtagtaatgggaattygygggttttttatttttttttygtygggtagtatttttatagtttygygttattttttttttatattggagtygtygaatattagtygttattttattttttttttttttattagtagttggtttatttttagtyggtygatttttattygtatttgggggaagygtaygtygtygttattaattttttgtattagtyggygtttataggtagttagtagtaggtttggttyggtygttagagttaggagggagyggggttgttttygtattaygggygttyggtyggtttattgttttattttttygggttggaggygggygyggtgagygttygtagggatgtttatygtygtttygatttgttgttgttttaygtataygttttggatgtygygggtttggtygagaatttggggttttaygatatgttttattagatggaygaggtgtaggtgagyggygttgyggtttttgatyggatttgtttattttayg

SEQ ID NO: 10996 - DNA, 6511 bp, Artificial Sequence; identical to SEQ ID NO: 10995
  Description of Artificial Sequence: Synthetic polynucleotide

SEQ ID NO: 10997 - DNA, 338 bp, Artificial Sequence
  Description of Artificial Sequence: Synthetic polynucleotide
tygtttttygygtatgygtttaggtyggttygtaggtttttttygttttagtyggtagttagttygttygygttggggttatygygagtyggttygtagyggggttatygygattttyggygtagatatagaggtygtttttagtttygtygtttygtggtttygttttygttgtaygtttttttatttttyggatttygtagggtygyggyggatayggttygatyggggaygtgaaygygtagaattatattttttagygtttygttygygttggaattatatttttyggggggttyggyggtgtattygtyggggtygyggattggaggttttyg

SEQ ID NO: 10998 - DNA, 936 bp, Artificial Sequence
  Description of Artificial Sequence: Synthetic polynucleotide
gygttttgttygtttattgggtttttygtyggtttatttgtatggttygaggggggyggggttgaygtygygttgggaatgttttggtygagatattgaggtagggtagagagygtttgygggygtygggyggagttgttgyggattaggattygagtygattttygatttygatttagattttaattygygttttygtttygtygtygtygttatgtaygaygtagagygyggttggagtttgtttttygygggttgyggttttttgggtttttattaygtyggggygattygttgtttgagygagtaygtttygtatttttttygygaygygygtatgttgttyggygtttyggtyggggygttgtattgygtyggygtttttttyggtatttygttgggtgygtttggggaygttgttygggttttaygtgyggagtgggtgttttttaggtyggggagygggggatttttaggggtygyggggttttggaggagygggtatyggaygyggatayggyggggtgtatttygagggtttttttygaggtagatgttttttgygggggygttgtttttgggttygggaagggggygttggaatttygagyggttygggtygaagtttgggattttygtgygtttttatttttatttttattaggygttygtgtatgaagggagatttttattttyggattgagagtyggagygtttyggagygayggggagtagggagygggattyggggyggagggtagtgttggtttttgyggatttygggttttttgtgttttttygggaggggttggaygggttgagttgtygaggggtygatttgttttgggtyggataaagagtggggttttggtyggttttttayggtgggttttttttttttggggattgagggatttaagatatttygygtttgyg

SEQ ID NO: 10999 - DNA, 2184 bp, Artificial Sequence
  Description of Artificial Sequence: Synthetic polynucleotide
gygygtttttttaatttttttgygttttagttttttyggttttagtattttygtgatttgagtatyggygggtttttgtttattgtttagtattygaygtatttgttttygtygygtagtttttttttttyggtttgagtttttttttyggygygtattgtttttgtgatttttttttttttyggttatagatgtagttttyggttagaagttttattttttygaggttttygtttttgttaggtagtttttttgyggygtygtttatttagagttttttttttggaygtttttttagtgtttttttagtagtttyggyggttttttttttatttttagtttttttttyggttttttaggaaggggttagattttagtttagtatttagygttttttggttttttttttttgggygttttttygatagttttttttagggaagttggttygttgygygtttttattttyggtygtygtttggatagaggygygtaattyggagggygtaggtttyggttyggagaagggggtgtygtyggygtttygattttttaggaatggggaaatagaggtayggtggattyggyggyggggttgggtttggggttggaygttgatttaggatttygtttttgttygttttgygtygygtttttttygggtyggttttgatygagtagttttaygygggttyggggttygtttattygataggagyggggggttgtagtttaygagtttaygagttygtagygaygtattyggagtgtaatttygtagagttayggagatattttttyggtgtgggygtttygtygygtttttttttygygggttgyggttattttagggtaggatagagtygagatgttygggtgggagygatgttygygtgggggygatgtaaygggggagatgtttggggggagggtggtaaggtgaaatttggtggagaataatgggggtgggtgggygatttttggggaggtgttyggtgtggggtgtttttggttygttyggggatagtgygygttttttygttygyggygttygttttgttygttttatygaggtttttygggagygtttgggtttayggtttyggggggttttttygagatttgggygttgttttgggggagtaggggttygggttattaaggttygtgyggatygtggggtgttttaygtttaggtygggggattttagagtttygttttttttaagggygtygygtttyggattgtaggtggagayggggatyggtttygyggggtygtygataggygyggggygggatagggtgggaggyggyggggygtagagtttttyggtygtyggygygattygggtatttttttggaggyggygggagygyggtygyggygttttyggggtggggtttaggttggaggtttyggggygtatygttttagttttatttyggtygggttttygygttgtttttgyggagagggaggaaggaaggaaggtagggagggaggggayggtyggtaggygtggggttygyggygttagggtttttttttttygttygttttattttgtaattygtagttygggyggggtttygttgtttttttttygaatatagtygtttttttttttttttttaatttygagygttttttttttygaatgygggagtttatagtgtaygggaagtttttttttttttttatygaggttgttygaygttttttttatttttygatttttygtaattattttttaaatgtttyggyggttagtagggttggggtgggygtaggagaattaggggttttgttygtatgtaggggtttggggtyggtgtggtygaatgaaygygygggtttagaygagtttgtgatgttttygttttttattttttygygatttggttttagaagatagtttgagaggtyggtggtygyggattttggaygygttttttttttgtttgtggtttttttttatttyggtagygttgtgagtttattttttatttataggagttatatttagaatttttttttggggttatagygtgggttttygatatttgtgtgattttagttttgtttttttagggttgygtggtgaagtttttaggatttttygygtgggttgggygggtgaygtggatgagggataaygtggtgaggttttygtygtggyg

SEQ ID NO: 11000 - DNA, 413 bp, Artificial Sequence
  Description of Artificial Sequence: Synthetic polynucleotide
tyggggygtgggagttgygttygtttttttttttyggygtttygtggagatygggaggtttagygttttttttagtttttagygtygtttttttagattttagagaygtyggttagggygyggygtttygggttattgygggtttttttygggygggygaygtggggggygaggtatygygyggyggygtttggygggtattgttgttygyggagggayggtgggggggttttagtagttggygggggtggagggggygggagagggagtttgygtygggttgagtttggaggtgyggggygggttyggggagygtttttggggttttttttgttatagtyggggyggttggaattttttttttttttttttttatttttttattttttttgttyggtttygtygttaggtyg

SEQ ID NO: 11001 - DNA, 403 bp, Artificial Sequence
  Description of Artificial Sequence: Synthetic polynucleotide
tygtttagtttttgygttyggaagaaaatttagygtaggtygggtttyggygygyggaagttttgygaattttaaatgtgtgygttgagtygaggtttttaagyggtaggagagaatttgattttygatattttttttaagataygygtyggtggatygggttttgggattggtttattttygggttggattttggggttygtatatttgaaagygtaaatttgaggaatgayggyggggtgatgggtattttatagagtgggatttaatygtgtttagtaatagatttttttaaatttttttttaaaaagagttttttagagttgtygaaattttygyggggtgaaagttaaatttttggagtygttgtgtagtygggtagaggatayggyggygygagtyg

SEQ ID NO: 11002 - DNA, 675 bp, Artificial Sequence
  Description of Artificial Sequence: Synthetic polynucleotide
tygtttttaaaygtaygattatttttttagttttttagtattaaatttagyggttttattyggttaygtttttaygttaggttatgatttttatatggtttattgygtaagtttatatttagttttaggaagygagttttaygtygttttagttttgtatttatagtygttaagyggtttyggaagtygaatgtyggataggttaaagatagygtygttgtttyggtattgtygttagagggygyggagtygtygtgttggtttgtattttttttgttaygttagtygaayggttayggtaatggaggattttgtygtatgygaygataggatgattgttttttttgaagttttattaaatayggagaggtttttttgtttttgggagaygyggtgatgtgaygtagyggttgtagygaaggttttttgtaaaagatggtygttgyggagttgttaggtgttttttggtaggyggyggtygtattataagatggyggttygttttagggttttataygyggggttgyggaggyggyggtttygagggttttygttttttgttggttttgttttygygtgyggggttgygatttgtttttgtgtgygggtggaagtgygggtygttttggggtygagttgtaatttygygatattttattggagtgygatgagayg

SEQ ID NO: 11003 - DNA, 580 bp, Artificial Sequence
  Description of Artificial Sequence: Synthetic polynucleotide
gyggtggtygaggaygttttttttggygttygggggtatyggatygyggttygtygggatggaggtaggtaggtagygtttygggagggttttagggagyggttyggagttgttyggyggggygtttagggygtagygggtagygtttatygagggygygtaggtatttttygaaattttygttgattaatattttttagtatttagtgaagtygattggtatttyggggagtgattggagttagttggttataagygggygggayggttggagattgtygggatagyggttgtyggtgttaygygggtggtgggyggttyggaaatgagygtttttyggggatagggggttttgyggggyggygatagttggatttttagygygtataaagtttgygggaggatttattgtagyggtygttttttttygtttagygagggygggygtaggggygggggatgtygaagggttaggtttgtttaggtygygttattttygttttagaygtttagttygttttttttataaaggaagaggagatyggagaygggaygtttgttttgttggtygaatttttyg

SEQ ID NO: 11004 - DNA, 858 bp, Artificial Sequence
  Description of Artificial Sequence: Synthetic polynucleotide
tygggtaygttgagtttatygagaattttaaggagttaaygagggygggtgtttttatatttttttagggattagygtygttygatygtaattttggggaagatttyggyggttttggagaggagggataggtttttattatttatttggttagtttygyggaagggttggtggatgaatgaattgttttttygtyggtygagtttygygggatagyggyggatygyggggtgtttatttgtggggatgttygagggttttttygagttygtatttagatagggattttaggggtggaggaygagygttaggagtagtagttgaggttttatygtgtatttttttatattyggttttygagggtygygygggtttaggygtttayggtttygtagygtygygtttttygygagaaygtagagattygggttygttttgagtygtygattgygggygggagtyggygggtaaggygygyggtyggtagtyggagyggygygtaaygtagttgagtgaggtygtyggtggaggtayggagtagtaggygttyggggygttgyggaggttttataggtttttygaggggaggygayggggygggtygygttttggttattggtygtyggttgattygtygtygttgygygttyggtgyggtygttttagttygtttttttgggttttaygtttggattgtttgtttagygyggaygttatttaaggagttgtttgyggttaygtgtggaggtttaygtagygtttttggttggaayggggaagtttgtatttagttttgggagtgggtttgggagagggaggaggagtygtygggagtttggygggagggyggtgttttyg

SEQ ID NO: 11005 - DNA, 5715 bp, Artificial Sequence
  Description of Artificial Sequence: Synthetic polynucleotide
tygggattyggtttttygtattygtygtyggtgttgtygaygtttatagygttgatgagattttygaggtttygggttyggttttaggagtttttgtttttyggttgaggaagyggyggyggyggyggttgyggttggggtggtagttygggttttttttttaygtygatggygatgtagttgagattattttggaagtyggtagaggtttttttgygtatgggygatttatygtttttaggataatygattaagttttygggttgattyggggtttayggtyggttttgyggtgttaaagggggygtyggttgtaattgtygtggggaggtgggyggttygtygttttttttagggtygatatttaygtygttttygttgttttttttgagagagatattttttayggaggtygagttgtggygtttggggttgtgggygaaggayggggataygggggtgatygtygtggtggaggagaaggtttyggaattgtggyggyggyggtttttttgygggtttgygyggatgattttggygtygyggtgggggttygggggttggttggtttgtaggaaggtttygattttygatatttgttttatgaggtttagtttttttaygttygaygtygggttggttaygygggtagtttttggtttygggggggtygygataggttgyggyggggtggyggttatattaaaagttatttyggtgtagttattattgttttyggtgttygaggataaygatgaggyggygttygggttttgggyggtggtaayggtygaggyggggggtaggyggtatagttttttyggggtyggyggyggtggyggyggttgtagagaygaygayggggaygyggayggaygygggggtaayggyggatayggggaggaggtttygggggataggaggtygtttaaggagtttayggggtggtygttyggggygttyggtttaggagatttgggggagttgaagtygaggtttatgtagtyggagagyggagatygttgtyggttgtygttgttggtgttyggggtgtttgagtttagygaygaggtygggttgttggyggataagagygaggaggaygaggtygtygaygttagtaggggaggygygggyggygataggygggtttygggttygttaaagtygatgttgatgtattygtyggggtttttgggtttyggtggtagtgggtattygtgtatgttgggtaggttgggtagtttttttagggataggygygtgggttttatygttyggtygygttggtttaagaagtttttygggyggtygtygttaggtygtaygggygaaggtattatagggtgagggggttgygtggggtyggtttygaaggygttggtygtttggttgggttttggygtggtttgaggttttagaygttttttttttaggatgygttttaygggggagtttatgagtaygtattggtygttgttttygttataggtgtagggggttttgtaggagyggggtaaggagttgtagtagtagtygggaaygtttttgagyggtttttygtyggggtgtagggttgyggagaagaagtygggyggggtgttygtggtgatygygtygttgggggataygttgaggtagttttygttgggtagtagtttgttatttgtatgttttatggatagtttggaatygtattatatgygtatgtatttattgttttygggggagttttyggygggygagttggttttgtagtygttttygttygtygggaatgttttgttygtygtagaggtgggtgttggtttygtaggtttygtagaaggtayggyggyggyggyggyggyggyggttttgggttgtaagatttgtttgggggyggataygttggyggggtttatgggtatgtagtygtygtttttgtagttgtygtttttattgttygygagggtygygtygggygttatgggtatgtagtygtygtttgtttttaggttgttgttggagtttttgtgggagtygatttygatgttttygtagttttttgggtaggggtggtaggttattttgggagaggaygyggggtaggaygggtagaggyggttygygttgttygagaaggtggttygtattagggtgtatttatttagygaggtagaggagggttggggtatyggtygttgtygggttggygtggttagggagtaggtttttttgygtagttttyggtttaggttttgggtygygtttttygagattyggyggtaggagyggttatagtggtttaggggtttgtttatggttatgtattygtagaatttatygtygtygtygtygtttygggtygggggygttttygygatggattygggygtgttgtttyggtggttgtagaaggygygtaggtygtttgggttggagtygtattygtttagggatatgaagtyggggtygttgggggagttygaggyggaggygttgtygttggagggtygttggtyggggtygtggtgtagyggatgyggtagaggygggtgygggtygggyggyggygggtaggagttygagtygtggtygttgttggaygatagggagtyggggttggtggyggygggyggygagtgygttaygggtatggatatggagyggttgtgttgtagygygttttttgtyggtagtagygttattttgttttygyggtygtygtagtygtygtttagggtgtgygagyggtttaggggygygygtatyggttyggggtttagggggtttttagttatygatatyggtttggygttygyggtygtygttttygtygtygygtygtygtygttttygttggyggtgygtattyggtaygagttgtatttggtygtyggyggggtggyggttaggttgtyggtgygygagyggygtattaggttygtttggttggggggtaggttgattaggtggtggtggyggygygygtyggggaygttgatggggtgygtggtygaygatttygaygattggtttttattgygyggtyggaattygaagagttttttgagygtttttatggtttttaggatggtttygtggatgttttgygttattatygagtygttygtttgtatttatagttygtyggggtttgtgayggtygagyggtttatttygatgaagaagaagttgttygagtggtygtagyggyggatgtttatgagttgtagygttatygayggttgttygtagttgagttttaygaagtygatggtgygygtagataggtatagayggtatattttygttaggtttttgttttggtttagatttttgggttttaggtttatttgttatattttayggtaggyggtygtggygggagttattagttygtagttgttttyggtttyggyggygtyggtagagtygtttagggygtygggtagggaggygttgtaggaygyggygggygyggyggyggggggygygttttyggyggtygygyggttttygttgattaggtyggtgagygygyggtattagtttttttgtttttgttygttttyggyggttayggygaagtattygtttttggtgtagagggygattaggtatttgtgtttggygtyggygygtttgttgatgtttaggtagtagtygagagygattattygtttyggygygtttgttttgtttygttattttttttygttttygtagtattygagtygyggyggttgyggygtygatttttygttygtygtygtttygtygtygttygygtygggttygygtagtaygaagaagygtttgtggttatgtttttgtttgygtaggtagtygtatttgygtaygttgtggttgttgttgttgttgttgttgttgaggttggggtygttttygttygtyggttygggyggttygtgtygyggygggttygttatygygggygttttaggtygygyggttygggttyggygtttaggggttggggygaggggyggagggggygygggygggggyggtttttttttatttttgygttyggtygttygttygattaygygtttttygggtttaggyggtggggaaggttyggggaggttygygggggttagtatygttyggyggygtygygtttttygygttttggggtttttgaggatgttyggygygggyggtggtygttttttttttyggttgtttgyggtygttgttttttygggttttygggyggygtygggggaygygttygttgggtygggagtyggggttttygagtygyggggtygagtttaaggygygygyggtygtatyggggttgttgtygtygygtygygtttygggaagtyggggtgygttygggygttyggggttygygtygtygtyggggttgttgttgttgttggtgttgttgttgttgttgttaayggygattygggttygtygyggttttygtygtatagtgagtaatatatygygtatygagtgattgaattaagaagagtaaaataatatgtgattyggygttaygtaggtatatatagygyggtygtttygtttygttgtttygtattggygtygygtttttygayggayggygygttyggttaatyggygyggygttygygggggygggtygygygttttygtttygttttttttttttttygggtygygtttttygtygttttttttttttttygygaaggtttyggttyggtygggyggggtggggyggtttyggttttattaattagyggtttgttgtggatgtyggyggaggagatgttatttagggygggaaaaggggygyggaagaggggyggggygggttayggygygtagggtttttttttttygtttyggatttaattaattgggtttgagtttttgtyggggagggggygtygggyggggtygyggttgggyggggygggggatygggatyggyggygggggttgyggttttgtagtggaagtatgggyggygagtygggtygtgttttyggggygyggggtttttattttgggygagggyggtygttttygygttyggggtgggygygttttattttygtttttygtttttygttttygtttttyggtygtattttygttttttygtagtygygaaaygyggggaggttttagggttygyggtygygggttygygagtatygygttttagatygagagyggygygygttttttygtggaggatagaggggygyggagggggygtttgtgttttattygttygygggygttttayggggygttttttgygttatttatttgttagtttgtygggaagttgaaatygygtttgggaggtaataggagaaagagatyggggayggtaggyggagaaagtgyggtttttatagygtyggggagagggyggattygygagttagyggtttttgagtygggagatygygygggygtttttttagttttygtaggagygtygtttttttttygtaggggygttttttttttttatygttgtaggagtattttttttttttttyggaagygtttttttattatatygttttaagagtttttttttttttttataggggygtttttttttttttygaggtaggagygttttttttttttttataggagygttttttttattttaggagygttttgygtttagtagaygggtaggtgggygggygtttattatttgtgtgygyggtgygggyg

SEQ ID NO: 11006 - DNA, 858 bp, Artificial Sequence; identical to SEQ ID NO: 11004
  Description of Artificial Sequence: Synthetic polynucleotide

SEQ ID NO: 11007 - DNA, 247 bp, Artificial Sequence
  Description of Artificial Sequence: Synthetic polynucleotide
tyggaattttyggggaggattaaygtyggygtatygtgyggtyggggyggggygtygtttaaatttaggttttgtgatagygattgtggyggtttggaaagygtgggtttyggttattgggtaygagyggttaygtgatagygggtttttttaggttagygttggtggttgagtgatgtaattaygtggggtttgaagttttygtgggtgtaggttttttygttatgttgaygataggtagtgttyg

SEQ ID NO: 11008 - DNA, 224 bp, Artificial Sequence
  Description of Artificial Sequence: Synthetic polynucleotide
aygttygtttttttttygggtagttttttttatttaggygggatttgggttttygttggatttagggtygttttttygtaggyggggtyggttyggygygtattttgtttyggatgttttggygtayggtttygygtttygtttttattttggygtatttggttttgygtttttttttygtttggygtagygttttttgtygtttttttttttttttggyggyg

SEQ ID NO: 11009 - DNA, 1174 bp, Artificial Sequence
  Description of Artificial Sequence: Synthetic polynucleotide
gyggygaattaaagagtagggaattataaaagayggtyggyggygagtaggttggggtgayggggatttygtggataaygggtttgaggaygtttagggttttagttttttttaggygtttttygtyggggtaaygtagagtagttgtygtttttttygygttttagtagatggtggtgttagttyggtttygtgttyggtygtygttgygttygygtttttttttttygtagatggtttaattagggttttygttygttttttygyggttttygtttygygygtttgggygagygttgygaaygtggagttaggtagttaagtgttattgygtatagtaggtagtttggtaattgagagtataatatygagtagatggtgttygtayggygtgatggatattatataygatagtttgagataatttaggaattttttggtgattygaggttttttttgtataaaatgagttttttttttattgtygtgtatttttggggttatttgtttttttttttygattgatattgaattggttttttattatygattttttttttagtyggaggggaggaagaatttaagtgggggagggygygggaaggggaygtggagggaaayggaagggttgggagtggggtaggggggtagtggygattttyggggggggagggtggyggatattagattttagggtygatagttygggagggatygggttttaggattttagttgtataaagtyggttyggggagggggygataaggagygagtttygggtyggttyggtatygttgtttyggtttagagtttttgtaatygtttggtttaygaataatttaaatgaaatttagggttttattgaaaaagttttttggggtttaatttagtttttygattttagtttatatgtttataagtttttaggggatttyggttaggaagttaggagtggggttygtgygttttyggtaggatttagattgtttttyggygtaggyggttttaataaagaagtttaygaggyggtttygggygygggtaggggyggtgyggyggygttygggagattygygaggggttttggaggttttyggttygygygygtygttygggagttygygaggttgyggtgtgttttagygggygtattttttaggtttygttatatyg

SEQ ID NO: 11010 - DNA, 8657 bp, Artificial Sequence
  Description of Artificial Sequence: Synthetic polynucleotide
tyggattttttttygggtttttygggygtttygttttttyggggttggtttttttttttttttygggygtygtyggtygygggtygtttattttttttgggttygtagtygtygttyggggatyggtagtgggattygagygggtgygygttygttttgttygygtygttggtygtttttggygyggtgtgtagggtttygtygggggtygyggtygtagagttgtatygtaggagattttggttttgtagygtygygtttaagttttygtagtttgtgtagttgtygtagaagggygaygtgtagtagagggggyggtttagtagyggygaggtagggtagggygagttttttggyggtgtttyggttgaggtyggygyggyggtygygggtagtttyggtggttygtagttygggtttaggttyggttgtttgaggttygaygtggygatttyggttagygattatagtttgggtttgttggyggggggyggygygttyggagaygttyggttgttttggggygttttgyggttatygyggggygyggtttygggyggggggtttagtagyggygtttttaagtyggtaagyggygaygaggttaygggtttgggyggygttaggtttygttygtttttttygtygtygttttygtygttttttaggtygttatatttgtttttgtatttygagttygattygtatagggggttttyggygyggtayggaagttttttttygttygattyggtygagtaygagtgattygtgagygagtttaygtgtaggttgatttttgtgggggygygggtayggtgggtggtaygaggggatagygtaggtatttggagtttttttygttttttgttttgyggtattgggttttttttaygggattttttatttygtttttattyggttaygtgataggyggagtttgattttttygggaagggttygaggaatygttygtttaaatttyggygattttagggtaatgtggtgyggttggggtttyggttyggatttggggtgttyggygggtaaygtttttttygttttagttttgygtttygtttgggaagaaagygtttygagattttgygtyggtygttgttygtttattttygttttttgtygaggttttygtgtttttttgygttttgtygggattttygtttttgtttttggtagygtygttttygttttygtttttattttygtttttgtttttyggggtttaggttattttgtttttttttttgaggygtyggygygygttggygaattaggtggagatttgggtgagggttattttggtgatgatggttagtatgattttttygtttttggtggggtaggggtttttgyggtgttygttgagttaggttttgagagtggtygtggygtttygygtggygtttttgyggtaygyggggtygttgagttggtaygggtaggtygygttgtygtaygggtggtagttgatggygtyggttatgtyggtggtgtgygygtygtagggtgygttttggaattaataagagtttgtgagtggagtatgyggagatttygygggtaattagttagaggatgttattttttygttygtttayggttatygtttttttygtgagtttggttttggggttgygtttttygtygtaaaagagtaggaaaaaygtagtgtgattygggattagttgttgattataaaaagtatyggagttttattttygaatttttgaattattttatttttttaaaatgatttatttttttttaagtgtttyggagtygttygtggtaatgtatataaatttttgtaygtgygygtatataggtttataggtagttttttgatatttaaatttttgtagatgtttggagtgyggttgtttttttttatttttttttttttttttttatatggttaaaaaaatattttagagtttttaatttattatttattgttttaaagttgggtaaatttaatttgtaatttagaagttagttatygtttygaattttttaaataygtygtaattagtattttaatttattttttaaygtttaaattygaggtatttgtagttttygttaaggttttagygattyggtygttgtttagaaatttygtygagggtyggtagtygygataatttygtaatggttttaatygttygtaaygtgtttygtygyggttygggtttggtttagtttagtaatttygagattygygagtygtttttaggtygtyggagtaggagttgygttygggttayggaggatttaggyggtttttagygggttaygygttygtaagtaygatatttgaaagtatggttygttggatagagtaaggtygaaatttgggygtttygggtyggatttyggagtygtagttgaatgttyggtttttgggtttaattyggtgatttttatygttttgagtttygygagtgaatgygaatygttyggtygtyggtttagaggtygtagtgaygyggattttygygttttaygttaatgtaggygagtatatagttygtttygaaygtttttttaggttgyggtgyggaaattagggataaayggygttagatttyggtttyggyggagaygtattttttaggtttttagagaaaattagtyggygagtygaggggaygygyggggggygygygggtttyggtygggtttagggaygttttygtttgtygygttgttttttttattyggggttyggtttagtttgyggggyggttaatygagtyggygatttttgagtygttagtygygttatattttyggyggttttygttygtygaattygagtttygtttygtttgagtttygtttgggtttyggygtttaggagtttygygtttygttygygttyggttattatgtaggaygggaagtyggyggyggyggyggyggygtyggtygagtattgtagygggttttygaagtyggtggtygtttgygtygtgaaggtygtygagttygggtaggggttgaaygtygagttygaygtygagygygttagtttttygttgygyggagtygttaaagtygaygygtygtaggtygggtaygagtagagygttagygagtygggygtttggtataggtagttttgygggtaggatatggtgggygyggggygyggggttygygttaygtygagtagygggtagggygygyggygttttttatttaygttyggtyggggygyggygyggyggygggtattyggayggtyggyggaggtaggtyggttygggtattagtttgggyggttygygggtyggggyggyggyggggtggyggtggyggyggtagtagygyggagtyggtgggygtagtygygygttaggtyggyggtyggggtttgggggagtttggagtygggagtgaggagttgaggaaggagygttygagttttygagggatattggaaygygtagttgtttattaygygtttatttgtatattygggggttygttttttttttgtttygttygttgtagttttygggtygyggttgggggaggggtagagagaygggagggaggygggggagggyggaggygayggaggygggyggygggagggatyggtaggtttttgtggygtagtygtttttttagtagtttyggttttagttygyggttygyggatttgtagtttagttyggtygygttgygtgtttyggygygtattttttttatttttatttattyggagttaygttttttgttyggtttyggtyggtttttatygttttyggttatygttttygtttttgttyggttttygttttttttagttattatttygtttttatttttttttttatttttatggattaggtagaggtygttygyggttaggttaggtygggtttaattaggggatttatagtttgtttygttgtgtatttygaggaggttyggtttttgtgtttaattyggaagtygtagggaagtggggaggttaggatggtggygttygyggttygggttttttttygggtagtgygygyggtttttatttttayggtttyggatttgttttgttttttggttygaggtttttygygtggtttygygtttggtygtttatttttygyggtttatttygtttagtatggatttggattyggggygttttggttgygaattgttaggagggttttgaggtgagttttttgtttttaaattygtagygtaattttyggggttttgaaygttaygattttttattgttgggaatgaygttagggttttagttaagaagaygtygttttttaaagagttttattttattttgtttttttaagttgattttttttttagatttgtgttgttaaaatattggggggatgattgttatttgataaatygtttttggtaggatttgaagttttttagttaygtygagaaygggtaggagtttaggttggygtygtyggtgtagtgggtattataggtagtttaggtgaygygyggttggagtaggggggyggttgttttgyggggtttagaagygaggyggttggygagggtttttaggattttagttttttagaattttttttttattaygtttttttaatttttttttattyggggatggtygaagagggygtttggttgtttatttygaagggttatttatggggggygtttagggggatggaagagtgttaggtttgtgttggtttattgggagtatttatttagtaggtgtttttattttyggaagtygtttygggtgggtgyggtggagaagagagagygtagtggtttggggygggttttagtttaggtttgtagtygatttttgtatttttgttggttttgtagtttgyggagtagttttagtgattttaggaygtagggtatgttgyggtttttttgtggtgyggttgtagyggygyggagggagyggagttygggttgttagtttggtttagggygtaagagaaatatttayggtattaggttgtttttttttaggtgtaagggaattagttgtaaattgtagtgttgtgtttgaggatggttttttttgagtyggtaggttttyggtaggygyggtttaggtaygttatttttttygttaggagttttygagtygagttattygttttttattagttattttatttattttttygtttatattgtttttttattattttttttataaattatatttttattttgtatatattttttttaggttattttaatataygtataygtatatatatttaygattatttttttttttatttatagatatttygtttttataggttgggttttttgtaaygatttagyggggggttttaattttgttgygattttatatgggatattttaatttagtttaggatagatatttttaattaattattatagagttgaaaaatagagagagagagaaagtagtygggttgggtaagtygtygatagtttgygatatttttgygttttttgggagggaatttttttaagaagaggggtaaatgagaggtttataygttggatggtaaatataaatattgttagattagatggtaatttttagggtttttttaygattagattagtttaaatgaaaaaaaaatygggtgtaatttttattattagggagtattggtttggagtatttttatttttaaagagyggttttygttgtggttttattagtatttggggtttatttttttttttttttttttgatttattttttttttttygtyggatttttgttaggggtagaagagaaaatagttagttattatataaatatttttagtttggagttggagtgtttgttttggatatagtygattttgatattaattaaatatataattagataygtgtagtggyggggagggtttttttatttagggtgtatttttagaaaygtygtttgtttttttttttttttagtttagtgttgggagtttgaagatggttttttttygttttgtgtgtattttttttttagtaattatatttttttattgaaatttatatgttttatatygttgttgtttgttattaataaaaatygtttattttgtattattaaatagtygatttttattatatgtygtttttattggtagtgattgtagtaaattaaaatgtttaygtagggatattaaaaatttaatattygttattgttattgaaatatataaattaygttttgttttaaagttttttgatattaaagaaaaaaattatattttttttttttaagttaaagttggtttggttttttttttaaaaaaaaaaaaaattaattatgagaaaatatgttgttagygtggagttttggygyggyggtttyggygaggttgtttgagagggtggygggtttagtttagatttygtttyggggttaygagggttgtaaggtygyggttttygaagaggagggtttgggatgttttgtttaagggygaggyggggtgtttaggtttgtggggtygttggggagagttyggtatttggtttttgaggttttttagttgtygttygagtaggagggagggaatgagtaggtaygtagggaaaatttagtaattgttttgtaaaygygatttttggttataataatttaggygatgggggtagttttaggtttttggtgggttttgtttttttttttaggtgtgttttaggaggtggggaaaaaattaatattgtttttatttttttttattgtttttgtaatagttaaagaatttagaaygagtttaygtggataygtaagttttagygagyggggattttttgygaggtygagygygaggaatagtyggtttyggaggttygggttyggggttttttyggggaygyggtygattgagaaggtyggggygttygtygggygyggygtygtttttygtgtygyggggayggaaggaggygaygtaggttaggagtygtgygygygggyggygagggggygttgtggttygtgtttgtyggttygagtttyggtaayggtgggygygatttattttttttttyggyggtttaattyggggaagaagaaaaaayggtatygaggtattttaataaaatttaagygatttttgatttttttttattgtggttttttatgagttttyggtgtttggyggggaaatagttatygttygggggtgtggtaaatttttttggtaattaagatgaaatagaygtttttatgtgggttttttttaatgaagtaatattggaaatgtaagtagttttagtgtattaaattatatygttatygtattygyggttatyggttttttygttttagggtttttygygtttgtygagggagagagygaggtaggaatagggggtyggggatatgagaagtttggttaagaaattttttttttttttgaaaataaaagygttgttataaatggaataaaatttaagttaatatggaatttatattttttttaaaygtygtttttaggtttagtattttgtgagtaggttggattggattttaygtttaatyggtatttttaggtttttaaagaygttttygaggtttaaatgtttttttggaaaataygtgtagaggagtattygtggaagattgaaaggttttygtagttttagttttggtaggatgtgtaaggtttttygaggtttttaaatgggttttygaggtttgggagattttygagtagttaygygggygttattttagggaygyggggyggyggttattgtgggtygggagggttttygtaygggttgttttgagygtttggattygggattttgygygygtttttttttttttttttygttttttttttttttatttataatttatattttagggatttygtatttagttaattagtttttgtttatttaattgttttgtttttagtttyggatttttgggaggtttttttatggttaatttgtttttttyggtattttttagygttttgtaaaatttgttttttttttatagatgtttygttttygaygtgttttttgaagtttttttttygtttagggtgtttataattttgaattttttagtatttygtygatttygtttttattttttttttttttttaatttygygttggtttygttttttttttttttttttttttttttaygygtttygttttttttttttaggtygtattttttttygttygggtygggagtttttygtggttaggygttygygyggtttaagatygaggttygttaygttgggtygttygtgggyggtttttattyggtatatygtggaaayggygygtttygttagttgyggttttagtttgggagggagygtagygyggggagtttgtagygtttggagagtgaggaaaagggatattttttggaaatggatagagtygagttttttaaagggatygtagttgaaagagattttttttaaaattagtaaygatttggtagttttagttttttaataggagatggttygaagatgaaatgtttgaaatttygtygtygttttatttttgtatataygygtayggtaggtttagattygtatagagaygtagataygygygygttygygtttttyggagaggtyggygygtttyg

SEQ ID NO: 11011 - DNA, 1059 bp, Artificial Sequence
  Description of Artificial Sequence: Synthetic polynucleotide
tyggtttgttatygttttttagggaaygagatattgttgagttggaagatttygygggttataggtatagtttttttgttgttggyggygttgttggggttgtttggtaayggtttygtggtgtggagtttggygggttggyggtttgtaygggggygatygttggyggttaygtttgtgttgtatttggygttggtygayggygyggtgttgttgtttaygtygttttttgtggtttttttgattyggtaggtttggtygttgggttaggygggttgtaaggyggtgtattaygtgtgygygtttagtatgtaygttagygtgttgtttatyggtttgtttagtttgtagygttgtttygtagttattygtttttttttggygtttyggttgygtagttyggttttggttygtygtttgttgttggyggtttggttggtygttttgttgttygtygtttyggtygtygtttatygttatttgtggagggatygygtatgttagttgtgttattygtygtyggtttaygtygtygtttatttgagtttggagattttgatygttttygtgttttttttygggttgatgttyggttgttatagygtgaygttggtayggttgyggggygttygttggggtttygggyggtayggggygygggtgggtyggttggtgagygttatygtgtttgttttyggtttgttttgggttttttattaygtagttaattttttgtaggyggtygtagygttggttttatyggaaggggttttggygaagttgggyggagtyggttaggyggygygagygggaattayggttttggttttttttagttttagygttaattyggtgttttaygtttttatygttggagatttgttgtttygggtaggttttygtttttttaygyggtttttygaaggttttggggaggttygagggggyggtygttttagggaagggattatggagtttygaattattttttagttgaaagtggtggggtagggtygyggtaatggagattyggggggtgggatggagaaggayggttyg

SEQ ID NO: 11012 - DNA, 1663 bp, Artificial Sequence
  Description of Artificial Sequence: Synthetic polynucleotide
tygtttttyggttttygtttttygtttttygggtggtgaaygtttgaagagggaggygtggtttygygtattttgttttyggtygygttatyggtatttatttggttgttgtygtgtttttygttygttttyggggttygagatttygygggatttygygtyggttttgygggaggaggyggyggttttagtagttgttttaggtaggyggtgttyggtagagaggagtttttttggtggtataagtgygtttyggggttttgaygtygtgtatttttatttygggygyggttttttttygggggaggttggggtgaggaggatagggaggatgaggyggaggaagaggaaggagttgagtygggggagygttygttaggaggygtttttttygttgttttygaggtygtygygggtttttttayggyggggagtaaatgttygyggattyggyggygtagygtggatttttgttyggttttgtyggygtygtygggttttaggggtttyggygaygagtagtataggttgggttgygaggaggagaagattyggtttagtatttgttttygttttttgaagtygttttatttgttgtttgtattattttttttggtyggtgtattttttgtgtttatygggggtggyggggagggygayggggtgttygtagtgyggygttttggatttttagygygttygttttygtygtttttgtttttgtttatttttagttgtaggtttttttagagtygggtttggaaggaggaggaygtygtyggyggttttggttygttygtygyggtagttyggggttttattttttattttttgttttttttttttttttttttttttttttttttttttgtttttttttttttttyggttgtattttttttygggtttttgyggygttggyggtggyggyggyggyggyggygggygtagtagtagaaatygggagtgtttagygattttaggttagttygggggaaagaagyggtygtygtygtygaggttttttggtttygggatttyggygttgtttttttttttygtatttgttggggtgggttggagtygtaatygaatttyggtygyggygtttgtaaagtttttttttygaagtttygyggttttagtttattggygttttttaggtygygttttggtttttttttttttttgatygagttygggaagttgtaygtatyggggygtgygygtttagttgygttagggatygtattyggygttttttgggtagtatttgttagyggygggggyggttgtttttaaattgggygygtaygyggtttatataataaggygygtttggttggagatttyggggattagtagtttttttggggygtttygggattattttttagtttttaggtgggagggtyggtaggagtygggtggagttaggtagggttygaagttagtttgttttttaggattyggttatagttgtttaggtagttygttgtgygttggtygttggtygygttggygatygtttgggtyggatgaagygagttggagtggaaattatgtgttttygatgggtttygtgggggygtygatygtttatattgagygatgaattygayggagttttaaagttgaagaygtttgttttygtttygttgyg

SEQ ID NO: 11013 - DNA, 2065 bp, Artificial Sequence
  Description of Artificial Sequence: Synthetic polynucleotide
gyggatygyggygtttttagggaatatatttatttagtaatygagattagagttggagygttgygtttttaattttggggygggyggggggyggygggaatttttgtttyggttttttttgtatygygggggtagttgttatttgtaaggygagygyggygygggggatggaagtaggygtttattggatagaatataaaggtagaaatttatttygaaggtyggggttyggyggggygttgggggtgggygtttttygyggttttyggygtttttygtttygagaygtttyggtttagyggtattggygygatygaggtttagtttyggggataygttyggttggtygyggggaaggtattaggtgagygyggtygygtttttyggaatttygttttygygygtttygyggygaygyggygtttattygtttygggagttaggaatttagggttttattatggygttggtygtygtygtygtygttgyggttgtyggggtgagttaggyggyggtgttgggttttttgtaggagtayggygggaaggtgygtaatttygagttgttgagtygttttaagtygttgttygatgtyggygattygyggggtygygtygttygtagggatygttttaagtagttygttaataaygtggyggtggtgaaggagttygayggygttaagttygtggtgttgaggaagaagtttyggttttyggagttygagttygtatttttyggtttttygggggtagyggtttagtygtygaaatttatttygayggttttgtygyggagygtttttgtttygggagtttygtttttggttygggtgtygyggttagtggagtygttaggggatttgggtttgttaatagagttataggatatttygggggggtyggttttygagttygtttagtygttyggggagyggttygtygatttatygtttttagtttttgagttagtttaggttatygagagatttttygtagaygyggttttatygtttagggttttttttgaggyggtatygttttgttttgattygttagaygyggagttygggttyggggtagygaaagggtygtygtagtagaagttttgtatgttgtyggtgygttgygtttyggttttygttaygtttygttttygggyggaggagttyggtttgygtyggtagttgtyggaggagtygagttygyggagtttttttttgttgttgaggyggttttyggtggaagagttyggtttgggtttyggtttgggttygggtygtttttygtatttgaggygtttgtygygygtyggttygygtttgttgagttttgaygtygaggagttgttygtygygtygtygtygttygyggtgtttttggagtygttygagtaygagtggttygtgyggattgtygggggtygttggatttattagttgtaygggttgttgttgygygatygyggtttggyggttaagygygattttatgtttggttttayggttttgtattgggtygttaagagyggygayggygagatggygttgtagttggtggaggtygygyggygtagtggygtattagtygaygtgaaygtaygtttttayggyggttataygtygttgtatttggttgtattgtayggttaygaggaygttgtygtgttgttggtggtgygtttgggtgtttaggtgtaygtgygtgattatagygggygtygygtttattagtatttgyggttyggtttttygtaygygttgygtygtttttttggygatttaggtttgygaggtattayggagttagatgygatyggtggtggaagtggtagttttgttgttaggygtttygtataggtggtygttattatttttagttttattattagtgtatttttgggygttttggttgaygattttatgttttaggatttggttygaggtttgaagaagtygagtttttttagtaagtttttgagygtttygtttatggttttaygtaaaaagataaagattygyggtggtttgttagtttttttagaaatttttygtygatttatttyg

SEQ ID NO: 11014 - DNA, 3487 bp, Artificial Sequence
  Description of Artificial Sequence: Synthetic polynucleotide
tygagagaaggtgagttyggygggygtagygggttgggtgggtgtggttygyggtttygggaatagatttaaggtttygttatygtyggttagtagttygatagttygttygtttggygagygtaggttttttttttagaaattgygaggattygagygtattgtttgtgtattataaggttaagtygggaagtggagtyggaggaggaggggygaggaggygaagggtggggagaggggygtttygttttttygttatgtgttagtttttggaagttatttttyggtttttaatttttyggggtaatgggaaggaagagtaaggaggaaggggtygtttyggggtaaaattttgttggggttaggatgtgtaattatttatttattygtttattattgttttttttatttttyggaaatgyggggtagygttaggygttaggaggtattygggaggggggagggggygaygagtttaatggggattttttttayggatygtttttttttttttgaggtygtttataattttaagttttttygttyggaatgttagttttttatttggagtgggtgyggggaggagggtygygttttttttttaagattygygttygtttttttattttttttttgttagtattttttgtttatttttggtgttgtaaaaygttaygtaatttattygattygtattttaaaattagygatttagaagtagggtttagggygagggttttttagygttggagtttyggggggyggggtgtttagtgtaaatttygtttttttygygagtgtygtttttaggttgttatttgtaaagaaaygtttttttgaygtagggagaaatggtaaattttaagtaygttattaatatggygttaaaagatttttttaagtataagttygtttttttttttttttaaggttgyggggggygtygttygggtttggggygygtagggggyggggtgtgagtagaaagtgtgagtgaaagagtggaggggyggggtatgtgtgtgagtgtgtgaagtgtgagtagatttgatgggatttgtaygggygtagtygtygttygggttyggttttggggatagggygggttaggggygttttagagtttatggggagttygggtttagggtgttagtaggygtggtggtggggttgygagggagggtattttttttttayggggttygtaaygttatttggatttttygtyggagttaaataattgggyggggggttgggggggyggygaygggggtgtygggagyggagattygagtgaataagaaaaaagtggttattttttttttttygttttttttgttygtttttattttatttttattttaatatattttttttttttaaagagattataaggaagttttggtttaaaaagaaatagaaatatatatagggggttggtgaatggtgtygatygyggttatygtagttggaggttattttttggggggggtgagtagygtttatggagttattttgygtttatttttagyggtatyggtttaggttttgygggtygatygttttyggyggggggygtggggtttgggaygtygygggttyggtygtttttttygtygygatttyggatggatgygygtttttygttttttygygtyggttttaggagttttyggtttygggagtatttttttygygtyggtttttgtagyggygygtagtygagggtagygttygttaggggggtatygyggagtaaggtaagatttagttttyggyggatgggttttgygtatttttaygaygttatttggygtttttgtaatagatttgttagygtttttygttttttygtttttttttgttygttygtttttttttttttttgttggttgtttgttttaggaagttagygyggagaggggggggatgtatagtataggggagagagattgygtatgttggttagtygtgttttaaagagtatagtgyggggaggttgagaggggygtatgtaataataatttttggaagggtgagtttggygattttttttattaatgattgyggtaaagygttttygggtyggygagggggygygggygggygggggygygttagggttgtaattttttygygggtttyggtygggygtaggggttgyggygggagatgggtayggtggggaggtygagyggttygggygggggtttygagaatttggagttatttgtttttttgttttttygagttttattttgttgataygtagtaygttygggygtygaatygggttgagtyggtgtatatgatttygygttgggtttaygtgtagtyggttyggttttagatatttttygggggttatygttttygttttgtygttttttttttyggttyggtgtaygygggygttgtaygygggggtagtatgttyggtttttggggttggaggttttgtataaattagatagtttttttggaggggygggggatattttttttaggtgagtgtggagggtgyggagtttyggygttaggggtgaggattggggtygggggtagtttttattttyggggtygygyggtagtttagttggggagaggygttgggagagtggaaatgtatyggyggyggtyggagyggygggtgygygttygyggggygayggtagggggygtggtttttgtttatttttttttaattttgtyggttygygtttygttttagggayggattygtagtttttagttttttgtttagggttttgtattatgggtggtattaggaagatgtyggtttgtggyggatttygtttgggaygtatatatttgatttttaaatgagtgatattgtagttttygtttttatttagygttgttgtagtttttttgtyggattttyggtttygtttygttttyggtagtggtattttttyggttttatttttttttttttttttttttttttttttttatttattygtttgygtttgyggagyggygttygttygtttttttttygtttgggtgtagatttgtggttttttatggttttttttygtttatttttgggttttgagatatttttttttttyggttaagggaygagaggggttaatttggygattygtagttgttttgttagaggatggggttgtttgygagatagttaggaaggttttattttagtttttagaggtttagttttgttttttattatatatagttattattttattygtttttggggttyggttgtttttttyggtgttttttaaatttttttttygatttgggtgttaagtttatttatttttyggygtygttttyggtygaatagttttttgtttttttttygtttgggtyggagtttttygtagtttttttyggttttttttttyggtttyggyggtyggaattaygtyggygygtttttagtttgyggtttygyggattgtttttaggggygggttggaggygygyg

SEQ ID NO: 11015 - DNA, 847 bp, Artificial Sequence
  Description of Artificial Sequence: Synthetic polynucleotide
tygaggggaaaggayggatttggygtttggggttttttyggtgggatttaggtgggtggttygygtggggtggggtaggggtatttataggygtttagygttgygggggatgtttygaggaatygygyggaggtttagttygtggtagtttaygttggtagyggagtaggtatatttggtggggtaggygayggttggaggtttatttaggaygttygttagygttaaggttagygttaggygggygygtayggyggygtygatttttgtttattygggggttatggtgtgtagggtttygtttttggaggaggttgtttttgyggggtaagaygygtggagttygaggaggygygyggggagygygggyggtttggggagygggyggyggagttagygyggaggaggggygagttyggtgtttaggygtayggggygygggyggagyggggygtttygggyggyggyggyggtagtaatagtagttttatyggyggggtyggygttgtttygttgygtatygttgggagtgtttaggtgyggagygttttttggtttygttggttygygggtygggttggggatttggggygagygtaatggggygtggygttyggggaggttyggtttggggttgggttggggagygyggyggttgyggttggggtayggggyggtygggtgagttggtyggygttygttttttttatttagtgagtayggtagatatyggagaygyggggtttattttttyggttttttttygattaagaaaygttaatttygttttttattggttgygtygygygttatgtygattaagttgggaattttgttggagygatyg

SEQ ID NO: 11016 - DNA, 909 bp, Artificial Sequence
  Description of Artificial Sequence: Synthetic polynucleotide
tygtttagtatagayggggtattttyggtgyggtttgttatygttttgtttggygttggygtttttagagaaggttatgtygattttttttttatttygttttagatttttttttttgagttgttttttttatagtttttttaggygttattgagagtttttygttttygatgggtttggggygtttggattttttyggggttattttgtygtttttttttagtttttttttttattttttgtygtygttttttygtttttttaggattttgygtatttaggttggttttatgttttggggtattttagtagtgttttygggttttyggttattyggtgayggagggagggagaggttggygagggggyggygttttaggttttagygygattygttttttagtttttttygtyggttatagtygygygggayggggtagggatttygagaatatyggggatttgygggtyggtggtttygggtaggttatttttgaygygggtgygaggtttttygygggygtgtayggttgggtyggagtygygtygggggtygggataygtttggggttagygttggygtygtygttygggtggggtgggtygggttygggtttagttttttttttaygggyggttygygtttygttttttagtgatttttatattttttgygtttygagttggaatttyggtaggttttgtttygggtygygygygttttttggggattagggttgtggtttttgtttygygtygtgtttttagatatygtygggygttygttttttatttttttttttttttttttatttygyggttgaygagggtygtttttaagtggttatgtttttyggtatggaygattttttagtgtttttgagggtttagggtttygttttygtttyg

SEQ ID NO: 11017 - DNA, 2150 bp, Artificial Sequence
  Description of Artificial Sequence: Synthetic polynucleotide
aygtygygtttygtygttygygggttygtygggagattgygggttygtttygygggtggggygtttyggtttttttygttttttggaggttataggttayggygayggyggtgatygggagagtaggttgygaggygygttttatygggttatagataaattatttyggtagyggtygygtyggaattttttttaagttattaaattygtttaygygygggagagtgttggggatgttttatgygttygygattttagaagttaggagtgtgttatttttttatatatttattttyggttttgtaygtttttttttayggttygagtttttgtaaatgtttggttagatygaggtygtygagatgttygttttagttttttttttygtgggtatttagggtagttygtgagygtygttygtygtygtttttagyggygtygggttttygaatattygtygggtgagygaagtatagyggggttayggagygtttygaygyggggayggggagggtagtgttttttttataaattagttttttgggtgaagtttttggggtttggagattggagtgtagggtgtgtgtgtgtgtgtgtgtgtgtgtgtgttgtattttgattttatggaggatttgtgggagaggaggtgtaaggttttttttttagaagtttggygtttttaggttttagttaygygggaygtttttygataattygatttttygttaggagagattygatttaggtttgygtygygaggtttttagttygtttttttttgygattttaaatttgggttttgatttttygtyggtygyggtggttygggttattyggyggyggttgatagttgagygtaaaggygtygyggttaaggttttygyggagtagttygggatgygtaygtygagggttaaggaggaggtygttyggtttggagttgggatygtaggttgggggtygggatattygggtttygtygggtygggggtagggtygygggtttgatagttgttgyggttygygyggaygygygttttttgtagttygttttttttatgtttgatttattattttttgttttttttttttttgttgttttaaaatatttttygaygttagtaaaatataatgygtttyggtygtygtaaatagtygggagggagagtatatattyggygyggygyggtygtyggttyggtttttatttttttttygtttttagaaaatgttataaaagygggtagggygyggggagggyggttgygygttyggyggtyggggtttttttttygygtygtttttttaygttttttygttygtttygygygttygtttttttygtaaatttgtttygttatttygtttagyggyggggttyggggttyggggttygggatttatttygtyggagaattttgygttttttttygttttttttttttygygttttttyggttygtagttttttttyggtagtyggygaggtgggtagttygtgggttatygaaagttygyggaggggaygygtattatatggtagttygtttttagtttttygagtgygttgggaagggggaggggaaggggygaggggaggtyggggggaaagygagagyggggyggyggygggagtgggtaggyggggtggygagggyggyggtygtttaygttagygttgtgygatygtagttygggygtgtayggtygttgttgtygttgttgttgttgttgttgttgttgaggyggyggyggttyggygttgtttgtttygygtygygyggtttgygtttttttyggaaygtttatatttttaatygttatattgttgatattyggygttgaygttattygttttttatttataataattttaygggagtygggtagygtattttttyggtygttggggygyggtaygttyggygattagygtaagtygtttygygaatggygtttygggggttggggyggggggygggggaygggggygggygygygygtttygttggttygygggagggggygygttttatgtygtygtagtagtagattttttygttttgtgyggtygygyggttyggagagtttttttttttyggttyggttgatygtttygttyggtttggttttttyggttaygaaagayg

SEQ ID NO: 11018 - DNA, 506 bp, Artificial Sequence
  Description of Artificial Sequence: Synthetic polynucleotide
gygttygttgttttygagtttygggtttgagtgttggttggyggagatttatagtgggtgtttygttttyggaygatgtttttgggtttttagatttagagtttygggaygaaattgttttaggaagattyggaaggattygtyggtygyggtaagggataggyggtttttgagataggaggagttaggaaatgyggggtttggtggggtgaggagtayggggttttttttttattttygyggggattttgttatyggtttagtgtggaggttttatygtttygttyggattygtggggtttygatagtgtggtttttgygaggattttttttatttttttygttttggggttgttgygggagggygttygggtagtattaggttttgagtgtttagggttyggtaggggtttttygttgtygtttttttgatttygtygtttgyggtttagggttgttggttttttygttggtttgggaggttttagtatggaygtygtgaggyg

SEQ ID NO: 11019 - DNA, 1503 bp, Artificial Sequence
  Description of Artificial Sequence: Synthetic polynucleotide
tygagtgggaygaatttttygttagttttgggtttttttatttgtyggttygyggtyggygtyggtataggyggagggygtttttttttttttgyggttttaagttaagtggaagatttttttttaagttttttttttygaagtttygygggtttttygygttttagttttagttatagtttgtggaggyggtatttygaggttgggygttygtgyggygttttggttttagtatttttygtttygaggttyggtttygggggygyggtygttygggttttygtgtgttttagggggtttygggtygygagtygttgtygaatggtttttgataaaaaaatttttgattattaaggttagtttttttttgaaagtttygttygtttygatataggaagtagaagggagygagagttttagagygyggyggtagyggyggtttggtttttttagagggttagagttagggatatgygggygttygggatttygygtttygygyggttyggygtttgagygttttygtttttygtttyggagttgtyggyggtatgattygataygtyggggygttygygygyggggattttayggggtaagttygggyggtygtttttttttttttygygatttttayggttygygttttggtygttttattttattttttgttttagagagtttttygggygygtgatttyggggttgtygggttgataygggatttttatygtggtygaggttagaatttggttttgyggggtagggggyggttttggtgatttygttggattygatgttggttaaatttttaaggttaggtattttattgggaatttagtgtatattttaggttgttggtggayggattaygagggagtgygtygttatttgttagygtyggggttgttygygtggaygyggttttttttttggygtttgtttygtttgaattttgtaaataaaattygyggttttagtttygttagtttgttgtattygttgttttgygagtygtagygygygttttygggtattagagtttygttgggygtggggtyggagattyggattttygtaattttgggtgttygyggtttaatagttgatyggtttttttggatygagggtttattgggtttttttttygtygtttttttgttttggtygtagayggtgattttyggatyggttttggtygagtttagtgtttgggtagggtttagggygtaygggttgygygygggttgtggatgtatgaygtygaatggtttgggaattgatttggagaggagttttyggtggttaagttttygtttygtttttttgtygtttttagttttatttygygagttygggtattgttyggggttgggttttgggagaaagttttttygttttgtttagtttagagggygttttgagaagttttaggtgttgtagagaygttyggtyggaggyggattttyggggaaagtttatttttgggtatttaggagygyg

SEQ ID NO: 11020 - DNA, 907 bp, Artificial Sequence
  Description of Artificial Sequence: Synthetic polynucleotide
tyggatyggtatagggggayggttagaygggatgtyggaagttaagggaygtagaggtyggygggtggyggygatggagaggatagattyggtttttagaggaggtygtgagygyggggtttgygtyggtyggaggagggattyggggggttgtaatatggttgttygggygtygttttttttttgttaagttagggttttggggagttgttgtygtttttygttygggttggggygaggaaaggaggggayggygttgyggtttyggaatttgtattgygattttggtagagtaaaygttgtatttgtagtttygaattgaattttttgtttttttttttttttttttttggttaygttttttttttttttttttattattttattttaattggttttaaaygagggtgaaagttgagtttgaggatgtygttgttatagaaattgtatagtaattaagggttggggaggyggggggggggggyggtaggttttttttttttatttttagtaygygtatatttttttttatttttttagttygtygygttttttyggagatttatatygttatttttygtygtagaaygggagggataggaatayggayggagggatygggaygaggggagggttttaygtagtatagttgtttttttgyggagygtttaggagattygggtatttttggaagygttgyggattgagttgttygyggttgttttygtttygagggtygggatagtattttaggagaagagggaygaagagggaygatagataaatagttggggagaggygggggggggyggttygtggggttygttgggttttatttagttttgttyggagttgttygaaatagtatttaggtttttgygggttaggatgaaaggtaygtgggtyg

SEQ ID NO: 11021 - DNA, 1925 bp, Artificial Sequence
  Description of Artificial Sequence: Synthetic polynucleotide
tygtyggttttaagtaggaaggygttttyggtatattagttttttttagygtttttagygggttyggygtttggagggttaaggygggygygtttygygggtgggyggggggggggggaygggatyggtgtygggagtttygttgttttggygttttttgggtttaggtttagtygttttttgggtttttttygyggggtygttttygttttttttttgtygagaygggygtggggtayggggtygtygttyggyggggagtttattyggyggygtagaygtttygyggtttyggggagggatttggtttgggtttyggtttygygtttttttggggaggagtygagaggttgtagttggyggyggyggtttygggygggagggggttttaggaagyggttaggtyggagttttttattyggtygtagttgttggtttggttagaatygagygygttttttyggttttygtygtttttttttgtaaatygygggtaggaggagttttttttttagygggttyggagtttagaggygtygyggggygyggtygaggggaggaggaaggagagygggagygtagtyggttygggtttagtygtgattygtggggyggyggtttygttaatttgtgggygttgaygyggggggyggtttygyggygttygatatttgttygttygggaygyggggygtygagaggttyggttaggygggagttgygttyggggyggtygttgtatttgttygggatttygtyggtygtttttygygtttatttttttygtttttygttttttttttttttttagtttyggtttttygggygyggygtgagagtagagttyggttyggaggagtygtttttttttygttygttygttyggygtttggagaggagygygttgaggatygggaygtttgyggtygtygttatygtttaggttygtygygtttyggtygggatggatttataygttygatgagtttygygtyggyggttgygagygtygagtttttttttgttgyggttttagtygtttttygygygttyggtttygyggattaggatttttgggtttttyggttgagggygyggtygtttyggagaggtygagyggggaygggttygagatggygyggggatttagygtttyggyggygggygttttgtaygyggttygggttyggggatagtttyggagttggtagtygttyggtatygatggattttgattygygaggyggygtygygttygtgtttagttgtagttagaggggygygygggtagaaygygttttaggttygggtyggttygygyggttatgaagatgatgttggtgygtyggtttygygtgtttattttgatggtgtttttggtggtttgygygttgtatatygttttggatttgttgtttaggttggagygaygyggygygyggttttygggggagttyggttgttygtgygygtagttygtygtygaggtggtygygttyggttgggtttaggttyggggtygtttyggggagttttyggtygtttttttygtygtyggygaygygggttggtttaataagtataygtttygtattttgtaggattttagtttygattttttttttaatttttygttttattygttggagaaattgtygttygyggtygagtyggtygagygygttttgygggggygggatttyggygttttaagattttaygatttygygtatyggtygttgttgygagatttyggttygygtyggttygagtygtttttyggtttyggyggagaygttttttttttggttaggttgttygagtattygttttatygggtggyggtttygtygtttayggaggaggaygttttgtttaatgtgaatagygatattaggtttagttttaaagyggyggagaattyg

SEQ ID NO: 11022 - DNA, 1287 bp, Artificial Sequence
  Description of Artificial Sequence: Synthetic polynucleotide
tygtggttyggaagtggattttgttygaygygggggtggtygttggagggtygaggatgtttatataggtttttggagggtgtgttttyggagtttgtttygttttttggatttatgggggattagtaaygtygttatatttttttttgtttttgttagtygttttttygttttttttttttggttgaggttggtaaaggtaggtaggtatgggggggyggggttttaggagggaggaggggttggtgggyggggtttayggatatttygtttygtttttagtggggtttygtattttttatatttygyggtttttttaggttagggttttttattatygygtttagaggtygggttagtygggygtgtattttaggggygtttygtttttygyggtttgggattttttagttaggatagtataaaatttttttatygtttattttttgtaaaaaatygtggttttyggyggattttggagataggaggtgtaaagggygtttataygyggttygggttygyggtygagagttggggggatttggagyggggtygggtygtaagaagattttgattttgtttyggygttggggygygtgttaagggttygyggggtattagttgtattttygaatttttgtgtttggtyggggagtttttaaggttttatttygttttggagggggttgyggaagttyggaggtgattygggttttgggaggggygtttttaaygtgggggaagggagataggggttttygaagatagygygagattyggagggggttttttygatttaagaygtggtaaattgaggtyggygaggagygaggttgagttyggggattaggyggttttttattgttttttyggttygtygtttttttgygtttgttygtaygggtagggtyggyggtygagtttagygggttyggggttaggtttgggtttygggggyggygttttttttttygygtygtttttatgttygtttttygygtygttttygttygagttgtttttttttaagtagtygttatygygtattttgtgttggggtygygggatgyggggttggygyggggttaygtttygtygtagtttttgttttattygtaggtaggagatygyggttattattagygttattagtagtatygttagtttagtttgggygtaaggagagggatgttagggattygyggtygtttygtttygtatttttttygtttatatttttygttgagataggtttttttttttttygggagtttttygggttaygyg

SEQ ID NO: 11023 - DNA, 2906 bp, Artificial Sequence; identical to SEQ ID NO: 6069
  Description of Artificial Sequence: Synthetic polynucleotide

SEQ ID NO: 11024 - DNA, 2146 bp, Artificial Sequence
  Description of Artificial Sequence: Synthetic polynucleotide
tygygtgttaggaaaagttgtgaggttggaaatttyggagtaaggttygattttggttagatttgtaggttgyggaatygggggygygygggygtagygtagtatagttyggttatggagtaygyggtggttttttgygttttttatttagggattgagttyggggttgtyggggagagygagagygagggygtygygttttyggygtagatattttgtagtttyggygygtttttgtgttttagtttyggggaagagttttygtygtagtttttygttttagyggyggaaggygyggttattttttygttttttagyggtggttygygggtggtggagyggtagtgggaggtyggtagygygggygtygygttttyggaggagttygygttttttgaggagygygygtgttyggaagagttygyggygtygtttttygaatygygygtttggtttgaggatttygygtttttygaggagttyggggagttygygttygtattttyggggttyggggyggtgtayggggagtyggatttggtgttggaggtgtyggggygtyggttgygygygtataaggyggtgttggyggygygtagygattattttygygygygygygtygygggaygtgttgygggtgtagggagtgagtttgayggygttgyggttgtttttygtygaygtttatagygggygtatggygggygtgyggttygataaygtggtygaggtggtggtyggygygygtygtttgtagttgttyggygtygygtagygygttatygaygtygtggggtygtagttgagtttggttaattgttaygaggttttgagygyggttaagyggtagyggttgaaygagttgygygaygtygtttattgttttatgagygattattatttggaggtgttgygygagttygtygtgttyggtygtttgtygggygtagagygggatttgttgttgygtygtygtttgygygtyggtygygtttattttttggtygyggygttygggtyggygggggagygygygggtagtyggttttagagtttttygggggaygyggaygygygyggggaygyggtygtttattgtttttaygyggyggtyggagagtggygygagttgaygyggttgttygagggygygtyggygyggggttgyggtttgtgygttttttataattattttttygtggygggyggygtggygttygygggtttygayggtygygygygttygttygattaggttttttgttataattyggttayggatagttggagygtygtgaggtttttgygttaggygygttygtagttgyggttgttggttttggayggttatttttaygtygtgggyggygagtgtttgtttagygtggagygttaygattygygygtygatygttgggttttygtggygtygttgtttyggggygttttygtygtggygtatgaggttattatttgttayggygagatttaygtgttygggggtttttttttttatygtttgtttaagtatgattygyggygygaygagtggtaggagtgttygtgtagtagtagtygygagygttyggtygatatggtggttttygayggttttatttatygtttygatttgagyggtagtygyggygaggygtaggyggyggggtygagyggggttagygtgtttygatattattgtttggttaagtagtggagttygtgygtygygtttttgygttttttyggyggttttaygggtttgtagttttttygttgygtygttttggayggygttatttattgygtgagtygygygggtatttggygtttttagtttgttygggaaggygaggtyggyggygaygtaggttagggyggyggtttygaggygttgggygtttttttggaygttyggggtgtgtttatttygttygtttttagtttgtttgagaagtygtttygaggggagtagggygtttygtaggtyggyggggtyggygggygtttttttyggtaggggtttgyggggtttaggtttttttgggttygyggaggaggaygtggtggggagtyggggtygttggttaygttggtggtttggatatttygaaggagtttygaggaygtttttagggtygttttyg

SEQ ID NO: 11025 - DNA, 865 bp, Artificial Sequence
  Description of Artificial Sequence: Synthetic polynucleotide
gygttttgygttttttttttaygttatttgttagggagtygttaaatagtaagatygygygttttgyggttttagagtgyggatttyggtygygtgyggttttgatygygtygttttatttttggyggggttaygtayggaygttatggttggygtygyggagtygggygatgygygyggattttttyggggttttgattgtttttgagttttttttgyggggggygtgygyggttygtttttygyggygttaygyggttttttttyggtyggggattggtgygttgggyggggyggggyggggygggataaaggygyggggtttggttgygyggggtttgygggtagttttaattttgggttygtagtttgygttgggtgygtaggaaggttagtgtgggggtygttygatatttttttttygyggaggtgggagtygagttatattttggagtggggattggtygyggagygggttgtttagggtyggtygaggtyggggygagttttgygyggygttggagattttgtattttygggygygygtagggttttyggtygtggtygtagagttaggaggggyggtttyggagttyggygyggggagggtttaggygtagtyggggttggtagggygygatattygtttttttttatttttgaaagggttttttaygtygagaagaggggygggtatggtyggttyggygaaatyggtttgtatagattttgggaagttatygtttgyggagggtgggattttatagtttgtttatttgtttaggttgagatttygtgttttagttttggatgttttaygggtttttygtttygggtagyggygtaygggaggagaagattttyg

SEQ ID NO: 11026 - DNA, 865 bp, Artificial Sequence; identical to SEQ ID NO: 11025
  Description of Artificial Sequence: Synthetic polynucleotide

SEQ ID NO: 11027 - DNA, 1463 bp, Artificial Sequence
  Description of Artificial Sequence: Synthetic polynucleotide
tyggggggtygygggaygtttaggaagygaagyggggaaggtttygggygygtygtaggattygygttggagatgggtttgaagttttgttttgaaaaagtyggttyggagtgggttgttttyggtgtttttygagtttttatgttgttatttaagtagtagaggaagaatygggtttggttygggaagggtgggtttagggttaggggtgtaaatttttyggtaaaagtyggtaaattaaaagtygtatatattttaggtttyggtttaggtttyggyggggtagggttttygaagtttyggggygygtagaygtyggggttttygggggttaagggaayggygggattygatttttttgttttyggtttttygggttttygtttttygattagtygttgagtygggggttggggtygtygttttygttygyggttygttgttttttttyggygygygttattyggtygtyggttttttttttygyggggggtttygtttygygtttygttttttygggttgtagtyggtagtttaygtttagggagggtggagggaggaggagaggygyggagaggagggaggggagaggggagggaggaaggygagagaaagggagttgtttttatttyggattttttagagtttgtttggagygygtatttagyggttttygggttttagygttttagtygyggttygygttttttygtttygttttttttttttttttttttttttttttttttttttaggtattttygttttttttttttagyggttgtagtttttagttttaatttttygygtttatttttgggaygygygttttygttttattttttgttttttttttttttttttttttttttttttttttggttttygttttttttttttaggtygttttttyggggttygattgtttyggtgtttygttttyggttygygttttgtttygttttttttttgtattttttgagtygttygtygtygtygtygtagattygtygygggagttttagtttaattygagttygatagttattgtttyggttttagttttagttttatagttygyggygttygttygagggagtttyggygttyggggaaggttttagtgggttagygygttttygtttagtttygygttttagttttgttyggttyggygaggaaggatygggaagatgaataayggyggtaaagtygagaaggagaatatttygagygaggttaatttttaggaggaggaggtattgggyggttyggtgtggtggygggggygaygygggatttagtgygggyggtyggyggggygygggttyggggygyggyggtggaagaaggtttaggtatggttygtgtttyggaygtagttttatagtgtggttyggggagggtggatttygggagygtgtgtttttgtgtttaygygygtttgygggttttaaattgyg

SEQ ID NO: 11028 - DNA, 1437 bp, Artificial Sequence
  Description of Artificial Sequence: Synthetic polynucleotide
tygtaggaatygaggagtyggtyggtttaggtttttaaggttayggggagggggttagggyggaaaaggtagtggagtgagggtgtygttttygggtygtgttaatttygtttygtttygtgtygtygaggyggggttttggttaygtaggaggtgygtttyggaggagggyggygagyggttayggggtggggagtaaggggygygygggyggtaggtatggaayggaygyggygtatttygtttatygygggaygttyggayggyggtyggygygygyggttygtttygagttygagagggyggggagataatgtttgttyggyggggtagtttaggtygtaygttttygttygyggataygggtygtttttattygggygagagggtagyggygggaaggygtygggagygatggttatttyggtttygygaggygyggtaggtttygttygttttttttygygttygtttggygtgygttttattyggtaagtttyggggttatagatttatttttttttttagggygtygtyggagttygygtyggagtyggtgtyggtgttgtygtygtgttygtygttyggttttaggttgtttatggtgygggggagggggyggygggaaggaaygygagggygagygyggygtyggtttygygggaagtgggaaggggygyggggagyggtgygttygygggtgyggagygggtggygggggatttayggggtagtgagaggggtagttttygygtygggttagggttatattaagtttggygggtgyggaaggtggggagggggtgyggygggggaggtagtgggagtyggaggggtygtygttttygtttttttattgygatyggygagtgygttgyggyggyggyggyggyggtagyggyggyggggggygggygtygggggagggggygggygtyggyggyggggggyggggtyggaatyggttttagttggggttyggttagttttttttttygttygtygygyggttttygggggaaygygtagttaatttttatygtttatygtgggttygtttyggtttyggtygyggggygtyggttttyggtygggttttttttttttttttygtttgggttagygttttttttttttttttttttttygygtttttttttayggygagtttttaaattttgatgaattygttyggygaatttttttaaaggggtygygygttgygygttttagttygygggaggtggagtttygtgtttygtatttagygtttyggtttttgggyggttttgttygggyggtttygygtttagggtattygtagygaggttttygggtygtygattttttttgtattttgatttagggttttggggttttygaygtatttattttgtttttaaatttagtygygtagattttagtttygggggatyg

SEQ ID NO: 11029 - DNA, 717 bp, Artificial Sequence
  Description of Artificial Sequence: Synthetic polynucleotide
gyggtaggggygggattyggaggyggggygtttgtttaygtygtttagtagyggagggaggygyggttttagtttygygtttaggagtygtataggygttyggggtygtagtaggagtttttttagggygtttagygttgtatttaygagtygygygtygttttygtttagtgygtttaggagygtyggtagtagygtgtttaygtgtygtatttgttgggattyggggttagttttttgtagatttygtygygatygggttaagtttttttttattttttttttttttttatatttttttgygatttagygygaggtggtttaggtttagtaggtttaattagygtatagtgggttyggggtttttttgttaggtgaggagtygttttaggatgattttttttygtaggagtygtgyggtgggtyggttttgtaatagttaggygaggtatatggggttagtaygttygyggttttygtgtaggtygttgygatttagggattaagtttagggttattttttattatttattygggaagtaggtttatttttgtgaagaaggttatagtygtgagaygttgygggtygttygygttgygaagtygagggagtaagtttgygaagaggtttygtaggtggtggtyggtatgtgttattatagtattggggtgggtggaaatgggagttttygtttygtttggyggttttttttttyg

SEQ ID NO: 11030 - DNA, 1713 bp, Artificial Sequence
  Description of Artificial Sequence: Synthetic polynucleotide
gygttgtagattygggttttttttttagtttaygygtaagtygggttyggtttatatttattatattttttyggttttygtttagygtygttttttttttygggtttttttagtatygatttagtatttattagygtygtttttaggtttttggtttagtttattttygggtaygtgtgagtgtgtgtttgtgttagtttgttagttttatyggggatygggttygtttatygagagagaagygttaatttttgttttagtattatttttagtttttggttttgtttggagatttagtggtttatttygtgtaggyggtagtaygtttttagtattaatttgaagttygttaygaattyggtgatgttttygtattggtygttggygaattttttttttatttgtagtagatatatgttttgttygggttgttgygggaaggygygatygtttyggttttygttgygyggttttttygttattttttttttygyggtggtaaygttttttaagggttgtagaaagggggyggtgaggtttyggtgttttttttgtaggaattygtttaggatgyggtagttttgttgtagttygtaggttagtttttgttttttgtagtaatygttttygattattatygtttttattttttttttttgatygttygygttttttagygaggaggtatttttttygtgggtyggttttgaggtttgggtygtygttgttatttttttttygtygttttttttttyggtygtyggtggyggtygttttttttttttagtyggttttatygttttyggygtttygggtatatttatgtttyggtaggtttaggttgggyggtgtggaatagtygttygaggtgttgggggaygygtgagygygagtygtttttttayggttyggtygyggygygtagttttygttatatygggtttggttttttttagtygtyggttyggttyggtgygygygggggttttgagtttatygtyggyggggyggggttatatggygygygaggaggggggagagaagaggagagtttaggtgttttttttttttttttttttyggyggyggygygygtayggttttygtyggttttattttttygtatttygttygtttgttttttatyggttaggttttgtygggtygtygyggtttyggygttttattttttttygggttagyggggggttgggagggggygaggaggaagggggtttttttttttttttttyggagggggtygtagyggyggtttyggtttttttttttttttatattttttttygtttttttttatttgygggggataygggtagaaggaggyggtgtayggayggggttyggygataattgttagttagaagtttygttgggyggtgaggggggagaaaggggaggggtagggagagaagggggagggtatttagtttttyggttgggaagagttgtggagagaagtaaagaaagaggttttgtygttattttyggtgygtatgygtagtagaataattttttttttttttttygttattatygtgtttygtttygttaygtaaaaggaagagtttyggtttagttataggtttagaagtttgttagggttgygyggattaatgatgtaattaatygtaggttaatygaatatgttgatggagggggaagtaaggygtttgygtagtttaattygttatyg

SEQ ID NO: 11031 - DNA, 699 bp, Artificial Sequence
  Description of Artificial Sequence: Synthetic polynucleotide
gygygttyggaaagtyggtttgggttttgttaattattttgaaggtaaagtatttgtatttttttygtygaggttggttggyggygtygygttggaggggaggaggttygggaggaggaggagaaagagtagygggaggattygggttgggaggggagygtagggttggggaggtygatgagyggttttyggtttttyggagaagtagtygagayggtaaggaggaggygaggttttgtyggggygaggygttgtttttaygygtttyggtygtyggttgygggygyggttgggyggggagtygaggyggtygttttygtattygttygttygttygttggygtttttttttygtttygttygtatttataggtatatattttaygtttttagtagttgtygttyggttttaygtatttatttgtatttttttaaygagttatttgatggttgttagyggygtgggtttygtttyggygggygggggtyggggyggggagaaygyggygygggatgtttygagygttygttggggagagaagyggyggyggyggyggygttgygggygygttagatggggygggaggaggggagattyggtatttatyggtttagagttgtttgaygyggtttgggyggatttygtygttygggtgtttaggtaygattttagggatttagggtaaagyggttygygyg

SEQ ID NO: 11032 - DNA, 1191 bp, Artificial Sequence
  Description of Artificial Sequence: Synthetic polynucleotide
tygatttttattaagyggatggttaagygttattyggaagtgtttattggtgggggygggaaggtatygtagtttaaggtattygygggtagggagygggttagggygtgygygaggtygggggtagttgggaayggaggaggaggggttygttygaggtttygttttttatyggttgyggtttyggttatagttagggtttagagggtttygagtttygggagyggaggtyggagtygggtttttgtagaggttgtttttttttgttttygttyggaygtggttttygttgttygaggtgtagttgtagtagggttyggyggtatatggtttttagttttttaagtygggtttttagggttttggggttgttyggttygttttttyggtygttgtttttagtttttyggttygtgttggtttttttagggattyggygtgttttygygggygtttygttgtygttttygtyggggagtygtaaagtttgayggaagaggttgyggttttygygttttagtygtyggttttygagtygtagtygggygtttttttgaygtagtygygygttttgtyggttttattygtttygygtayggatggtttttaagtggttygtygttaggtyggtaaatygtttttttagttgttgtygggygtygttygygyggtttygttagtttaygtygtygtygtygtygttggggttgtttttattatgagttyggtyggagyggtttggttttyggtygttygtagtatygttttygtygtagtaattttygygtttagtggygttattaygtatgygttatatyggttttattttaatygygtygttagtttygtgggttgaggggtygygyggttaggygygggtaagttyggggttggtagggyggtyggggtgaygayggaggaggagaggaggtygygggyggyggttgttggtttagagttaaaggaggtygggaatttgtttagattgaggygtgttttgttttttgtggtggagttgttttttgggtttgttttttttaggttgygttgatatatagttttttyggggagtgttttgttgtttagtttttyggttgygygggaaaaagygtgtatttttagttgagttgtgttagggygttttygtgtaggtttgggtattgtaggaattagtygttttygttygtttyg

SEQ ID NO: 11033 - DNA, 536 bp, Artificial Sequence
  Description of Artificial Sequence: Synthetic polynucleotide
tygttttttaygtgttygygggggggggyggggtyggtggattgggygtgagttaattggttggggggyggggtattaygggttggtttygtttaggygttygygyggatttygggtggaatgaygggagggagtttyggtagtttttattttttagygatggygtygttgtgtygygtttagtttttagtttgtyggtyggtatttatygttattyggagttygtttagayggtgagatttggggygggttygaggtagyggygggaygttatttgygatygggattatgaggagttgttagattygtggggtyggtaaygagagtagtygyggtatttgttgagaggaaagagggagyggttyggygyggttggggygyggtagaggtttgttygattttyggttatgttattgttttgygtgygyggtgagtgygyggattgaggyggggaggyggggtgtyggygtagaggttttygtatttttttagtggaygttyggtgatygttttatttaaattttatatttygttyg

SEQ ID NO: 11034 - DNA, 728 bp, Artificial Sequence
  Description of Artificial Sequence: Synthetic polynucleotide
tygggygttttattygtygtttatygttttatttttttattttttttattygggttttttaagtttttgatttaggygttagatttttttattatatttttttattttaggygattygttttggtttygggtgtttttagtttgygygggtygtttttagttttyggtggatattygtttttagttygtygttttttgttyggttttgygttttttggaatttttgggtttttagttttygtygtttttagaattgygtttgygtaataatggttatagtggtgagggggttttttygtygagatttggggatggggyggggygtagggaagggaatygtygyggtagtgtttgttygggggttgggttggttttatygggyggggtyggtttatttgtttttttttaygtagtgtaattgattttgttttttgggttagagatggttttgggtttygggygggagtatygggttttgtagttgtatttgtattggggggttgtaggtygttygggttyggagtatattgtggaaggttatygtttttttgtygaggtgagygyggagttggtygagaaggggtaaaggagyggggyggagyggggttagagaygtggtttttttttattttygtgttttttttagatttaygtggtttattttagtatygtttttgttagagttgaygaggttttggggygttygggaggtttggtygtgttggtyg

SEQ ID NO: 11035 - DNA, 1431 bp, Artificial Sequence
  Description of Artificial Sequence: Synthetic polynucleotide
tyggtyggtttttttttttttattttttgatttyggtygttttayggatygtagggattgttttatygtttttttttaygtaattattagagaatttttttaaaaatatagattygatgaggagtggttttttygttttttttttgtgtygagaagggatttyggtygttaataataaagaygtttttygttttttttttttygtyggttygggttygtttttttygygttgyggttttyggtttagygtttttttttygagtygggttgyggygtttttaaatttygaggtygtaygtatttgtatttgagyggttygggtygaagygtygggtagaaggggtygagagagaatygtagtygaygygttgttttttataaggygagattygygtttygggygtygttygatttttttygtttgtagattggttygatagaggagyggggattagggttatagttttyggygtyggggygaagaaggayggyggygttttaggggtttygtttaygttttygagtttygtttygygtyggttttgtttttttataagagttygygttttgttgattaayggtttyggtgyggggygttggagyggtygtygttgttygtyggttgttttygggttttaygtttygygyggtygtggtygtagtygtygtygttatygtttttttttttggtattgtagaygttatttagatttagttaggttttttttttttttaattttgttttttttgtttttttttagtttgttaagygygaggttygtttyggtagygggaggaagattggaggggaayggaggggaygagtataatttttattgagttaggagttggttattgattggaggaaggtgttaaagttgatttyggttttagtttattagygggyggggggagagayggagtttagttttgttttatttttattaattagaggtygttyggtagggtgggaggygttttgagtttaaggagaggttgagttygtttagtaggaggyggggattgyggaaaagaagaattaataggaataaaggtttttygtttttttgatttgatggattatatattygggttaatgggggaatttttatttygaagaaagtgggatttgtttttygggtttgagaaagaggttgygyggagtyggaggggtygaggttgygtygygtggagtggtttggtttaatagtagggagggtagagygatgttttttgattttttagaagagttaygtgggttgatttagagtyggggyggaaaggttgygtttgtttttttygggttattgatagaagygttaatttttgggagtagttygttggttttttttttttttatttttttgtttgttttyggygaggggtggttttgatttyggygatgagtttttagaaaggtaaygtggttyg

SEQ ID NO: 11036 - DNA, 588 bp, Artificial Sequence
  Description of Artificial Sequence: Synthetic polynucleotide
tygtagaataggygyggagttaggtttttggatttgttttgttggaaggagggtygyggagaygtaggygtttygggtygttygygttgtttttgtttgtttygtgygggagtyggggtttttggttttttggttttttggtttttgyggttygggygaatttagagygtattygtaygtyggtttyggtyggtttttagygttygggttttaygggtygygtttttaygyggygttttttagagattttttttttttygggtgggyggygtagyggggtttyggygtygygaggatttttygygttagaataaaggaatgtggggagggggtagggaggagtttaggttattgagtagttttagtataattgtygttyggaggygtttttyggtttygattygaggttttygttygttattattagattygtttttagtttyggattttygtagattttatyggttygtaggagggagyggygtattgggggtygtayggattygttattggagatygygatyggaaggtggygttaygyggtttttataggtttgggatttttattygagttygtaaagtaggtyg

SEQ ID NO: 11037 - DNA, 1203 bp, Artificial Sequence
  Description of Artificial Sequence: Synthetic polynucleotide
aygtttaattttygagtttgtayggtgtagtatygtttattttgggtttagggtaatttgggtgtaaaygtttttgygggyggatygyggggtgggtttygggtatataggaggattagtagtagtyggtyggtaggyggagygttgttagaggtttgggttttataataatttttataggattaaaataaayggygagaygggttgygygtataatagtatattygggyggttagtygagtygggggtttyggttygyggttgygttaagttttagaattatttagtttygtgtttgtygttyggggttyggtttygtttyggtyggygtttatttggyggtgtygttttyggaagattayggygaaggtttygtgttttaygagattttttttgttgtattygaagttatttattatttttatggtygygttttyggggtatatagyggaygggygggyggygtagtgyggygtaggtattagtatygyggtttygygggttyggagygygttagygtgyggygggtttggggtagtygtagtttygggttygggyggatttttatgtygagagatyggagyggaaattggggaagttgtygygyggagttagggttagygaggttyggttyggtttttgtygtttatggttyggtttgtygtyggtygttggttgtttggygaagyggtttyggygttgtygggttaggggtgtygttatygttattgtgygygtttagagtygtataygygttttgaggtagtgaggggttyggtattttttatttttagttygtygggttttttyggtttttttygttyggggygttgttgygayggygayggtygtygttttagaattygtatygtygyggtttygygttttttygtttygyggyggygtttaaygttttygygygygttattygttttygygygattggttgtttttygygaygttygygygttttgaaggtygtagygttagtyggtttttttygtyggggaaaggagtgyggttagggtttggygttygtagttgggtagattttyggtygtttttgaggyggggaygaagggygygattygttgyggttatagygggttaygggttgygggtttygttttgggtttggggagtagattygagtygattaygtttygggttttaggtygttgggaggyggattttagagaagyg

SEQ ID NO: 11038 - DNA, 5370 bp, Artificial Sequence; identical to SEQ ID NO: 6119
  Description of Artificial Sequence: Synthetic polynucleotide

SEQ ID NO: 11039 - DNA, 1691 bp, Artificial Sequence
  Description of Artificial Sequence: Synthetic polynucleotide
gygtgggggagyggggygggtttggtagggaygttggtttttygatygtgggataggggttgggttgggaygygggtttttattaggagtygygggggaggggtagggtyggagtttttattttygtaggggaggggttggttygggaygyggttttttyggggygtaggggyggggtygggtggtaygtygggtttttttttayggtygtgagggaggggtyggyggygggggyggatttttggyggtttttttggttggggttygygygttygyggtagtttttygtggaggttattgttygtgttagtttttttygttgtttygttttttttygttgtygtygtygtygtygtygtgttygttttagygtttttatttygygtttgggagygaggagtygttagygttttygtttygtygtygtygtagygtttttaggtygttattygttatygaaattttttagygttygygtttttttygggattyggyggyggyggggygggggyggttygggggyggygygyggttgtttyggggygtygggtttttttyggtygtygtayggtygggattyggaggttgtyggttggagggaggttyggagygyggtygggygygyggygtygttataagttgygttgttygygaygaggtgagtgygtagggttyggygggtygggygyggggttygtaaatttttgyggggaggygggtttygygttgattttttagggttyggtyggyggttyggggygttygaaygttttattygtttttggaatttttgtaggtgtaggtygttaattgttttygyggygttyggattggggtgyggygygtttttaggagtttgaataatatttygaggtggtygtttttygaagtgtyggygygttttgyggggagagayggaggtyggyggggggtttttttgttttggggagggggaagtggtyggtaagtttagggaagygttyggtttttttttyggtgtttttttgtttgtygatttaggggtttgttgggtaaatttgygttatygygggtttyggggatyggggtggagggyggtggygggattttttygttgttggggagaagagttttatttatattygggaygygggtyggttttttyggattygggtggaagygtagtttygyggagtggggtaagyggygggygaggtggygygggtttygtgtttgtttagtttttgaygygtagaaattgttaaggaagtygggagttttagtttttygtttattttttyggtttgagygtayggttgggttgggggtatttttggttygtygagggtttgtagagygtygttyggggagagygtagatttgttgttgtttttgggttttgayggggygggtggggtgggtttygtagattttgggtttyggttttgttatttagggggattttttttaaygatgggatyggtgttyggagtggagtatggggagtgygttttygggagtyggygttggtyggatatgtgataattgtgggtygttggaggttygtttgygttgggatagggtttggattttaygtgygtygtttgtgtttygttagatyggggtyggggttygttttttgtaaggtttygtgtttttttagttagttgygttggaygttttataaaggtagggattgaygtttattttyg

SEQ ID NO: 11040 - DNA, 1223 bp, Artificial Sequence
  Description of Artificial Sequence: Synthetic polynucleotide
gygttgttayggagatttyggtygtyggagatttygtygtagygaggttattgggtttttyggtygyggggygggagyggygtygatayggggtgttaggaggatttatygggyggaggagggggtttgtttattttttygtatttttttgggtttttttttygggyggtgaygtgaygtgttgayggygggttygtgtyggggagttgggtygttttttgttagtttygagttyggtttttttttttttttttygttygttttattagtyggagttyggtttagtgttttagagaaaggtyggtttgtagtattygttatygtygtyggtygttygtaygttygttyggtgagtttygggtgtygtygyggtygyggggtttagtgygygtatagyggtttggtttyggtttggtyggyggttygtaaggygttttttygygttaggtygggyggygtggygygyggygtygagtaggtttygaggaggtygtagttaggttyggggaggagttyggttgtttygagyggyggyggaggygygtttygtaagygggygggggttgggggagggtygttyggttgtgtyggaggyggtygaggggtttygggtyggtttygyggtygatttggggtatygygtyggggtgaggtttggygaggaggygaaggttgtaggygtgaggtgaaggtygtaggtyggtygggtygattttygttatgtaaatatyggtgagggggggggagggaygggggataagatggyggyggttyggygtttgttgtaggggaygatagagggggttgtygggagggggagtygttattttggaggyggtgtttggagagaaaatttygttatagttygtgagggggggtgggagagygggyggyggyggtagyggygtyggtgaygggtttyggaggttyggygyggyggygtgtgygygyggaggggygtgttygtttttygtggyggttattgtttttgtygttatgatgagygttygggttttaggygttyggyggtagygttatttttttgttttgtttttygtagtttygtgattggttgtagttttygttgygttttagttgagttgtygtaggyggttatygtygtygttyggaygtygggatygttttatttttagygtttttggttttgygttttttttygygtttgtagttattygagggtagtyggggtaggtggtatttyg

SEQ ID NO: 11041 - DNA, 1103 bp, Artificial Sequence
  Description of Artificial Sequence: Synthetic polynucleotide
aygttaygygtygttttgttatyggtgttttttgagtgaygttaaaaygttttggatggtggtattgggattatggatggggtttatttagtttttttyggtttgttattaaggggaggggtygtyggtgggtttttyggygtygttgtaagttatygggtttygaagtyggaggtygaaayggygtgggtttygaagyggggtygttttttagggagtgygtaggttagygaggatttyggtgaggygagaygttatttttatttggttgtttttgttgtttttatttttttagttttagtygtttgtagtgattygtgattttygtaggtttttaaggatygttgygygagggagggggttygaggygttttyggttygtttttttttyggttttyggattygagtyggttttygggaaagagtttgttatygygttttygtagttatttttttygygtgttyggttttttttagtggygggggtaygtgggygygyggggtgygtggtaagtygtttttttttttaygttygttyggtygtttttygygygygygtttygtatatagttttygtgtagtgggtagagttyggtttygygygygtttygtttygtttttggttagtygygttygttttygygtttttgttttttttttttttttttttttygttttttaggygygtattttttttttygygtttttttygygttttatatttatygttyggyggagggggtttagttygtagtygtygtygttatygtygygtttyggtttyggtgtaggtagyggtygtygtygtygagatagttgygygggygagtatttttaygtagtaagttygtttttttttygtttgtgygygygtgtgtgtttttygttygtyggygttttgggtttygggggagyggttgtttttttgtttygtygtygtygtygttyggggttggtttttgyggtttyggttgtttggttttttagggttgggtattgyggtttyggyggtttygttgaggtygggggttaggggtygtttygggttgyggggtgygggaygagggattgygagtgygaggttttttttggtgygtgtttyg

SEQ ID NO: 11042 - DNA, 616 bp, Artificial Sequence
  Description of Artificial Sequence: Synthetic polynucleotide
ayggtagttttygattgaattaattygatagtatttgtggaagtygttggttttgtgtyggggttagatygygtaattaggagygggggttttttaygtggyggaggtttttyggtttgggggttaygggttyggaggaatttgtttggaagttttttattayggtagagttttttggagttygtttygtgttygataaggggagttttagatttgatttttttagtagtttygyggggyggggtygagaaggggygggygggyggaggaygttggygggagaatgtgyggaatgtgttaggygtttttatttattttaggaggggtagaggaaggggtyggtygaggggaggggygaggggygaggtttygggyggtyggagaaaatttgtttgtttttttgygggyggagtttagttygygttttttygtttttttgygygtttttygttgtgtatygygtttygygtttygygtttgttttttyggttyggttyggttyggtygggtgtygtttattygagggagttygygttttgygattgttygattttttattygttttaygagtygggtatyggtgttaggtagggttgtygagtygttattggatgyg

SEQ ID NO: 11043 - DNA, 206 bp, Artificial Sequence
  Description of Artificial Sequence: Synthetic polynucleotide
gyggygggyggttggggaagtagttttgtggtttttyggygggtgaggtygagatagagattaatttttaggyggygttttggygttgagttygygttgaataagattttttygtagttttgygtttygygtygggtgaaggggygtgtttttgtaggygttyggggttyggtttggagttggyggtyggtaygtygtttttggyg

SEQ ID NO: 11044 - DNA, 1141 bp, Artificial Sequence
  Description of Artificial Sequence: Synthetic polynucleotide
tygtagtttgggagygygyggtttyggggatggggagggggtygggaggaggygtgyggttttgggggygygtattgygggagygygyggtggygaggatagggygggtyggggttygyggggygaaggygygyggtgttygggggagggygggtyggggygygygggtyggggygggggygygygggtyggggygggggygygyggggtyggtyggygygygggggyggygggygyggygttgttaatygtagataaaggtygttttagtgaattatgtggtgtygggggaggaagtgyggtttgtttttttttttttagtttyggggttgtaggttgagygygatgygyggagattttygygggggyggyggyggtygtgagtttygatgaggttygagygttttyggtygygyggtagygttttyggttygatggagatttygtygtgggatttagttygtaaygattygttgtygtttaygttgatttyggtygtgtttttttaygtgaagtttggttttatygtygtttatatygtgttttaygygttgtttttygtgtttatttaygtgtagttttggttggtgttgygttatygttataagyggtttagttattagagygtttttttttttttttgttttttttgggtttttttgyggatygtttttttttttttttattttaaagatttygtggyggttaattygtttagttttttygttttttggttgttttattgtttttttgtgtgtttgtagttttttatttttaygttgatgaatttgtattttaygtaggtgagttttagagaggtttttggaggygtttatttggyggggtggttttygyggggygttygaggtaggggygatggtagtygygggggygggttyggttttagggttgagagtgtagggagaaggygtyggttttggggtygttygaattttgttttgtttgygggtatttgttataggaaattttttgttatttttaaaaggggtaaggagaaggtaggggagggttggaggtygtygtttattygttgtttttggtttygtatygtgyggtggattyggggygttttttygtgygtagygygaagtagtagygtttgtataygttagttagtayg

SEQ ID NO: 11045 - DNA, 1819 bp, Artificial Sequence
  Description of Artificial Sequence: Synthetic polynucleotide
gygtygttygtttttggtttttttgatagtygtgttttattttygttttgtgttttttttttyggatagtgttttttttagggtttatttaggagggtgtagyggtggttttyggggyggtggtygtggtgggggtgttagttgtaggggtgttttyggtgggtgggagttggtggtttttygttggtgttatgggattygtatgttygttttgygtttttyggtttttgagtttataggtygggattttgtttgttagtygygtgygttgtygtttaatttttgtaggygtagagygygyggyggyggtgatagagaattttgtttggttgtttaaatatagttttttgtagaaggattttgygttyggggaaggggaggaatttttttttttttgggygttygtttttttygttatggttyggtttttatattygtttatatttggtygtagyggggygttyggggggaggggttgaggtygygtttttygtygttttttgggygygggttaggyggggaggaggggggygtttyggtygtgtgtttaggattgttttttagyggttattygggttttagttttttaggtttggttttgataggygggyggagtagttagtgygagatagggaggtyggtgygggtgygggaatttgattygttygggaggygggggyggggygggggygtagygygyggggaggggtyggygttygttttttttttttatttatttagttgagttagggggtttaggggttttttyggyggttagttttgtattgtaggagygygggygyggygttttagttagygygtagggttygggtttygtygggggygttttttygtygttgtttttygygygattygttgtttattagttattatgtyggatttygyggttaaygygtagttggatgggattatttyggatttygaaggtgggtgttgggttggttgttgyggtygyggaygtgttggagaggattttgygggtgggtttggygygggaygggggtgygttgaggggagaygggagtgygttgaggggagaygggatttttaatttaggygttttttygttgagagygtygygygttttyggtttygtgttygygtygtttaygtgggggattttgttaggggtattygygtagattttgygygtttttataggattttgtgttygttttgygtattgtygtttgggtttttttttttttattgttgtttgtgtttgttaagygatagygattttttygagggttygygaggttgtttyggaattttttaggaygtatagttttattttgggaaatttatyggttttttttttttggtttttttyggyggttttygggtttygtttggattyggtaaygggatagggaggtygttttttattttygattgagtggatagtygygttttgttygggtggatagttttttttttttttaygttagtttyggggtygttaagttgtgtagttygtgggtygggagtatygaayggatatagtttaggtygtggtagggtttagagtgggatgttttatggtttttatttaggtttggggatatttttattygttttttagaatygggtygtgggggatagaaggggtttgygtgygggtagggagagtattttggtttttttttgttttyggggtttataaagtgtgttgggatttgyggggttgttttgtttaagtttgggtttggygttygygtttttgagtttgtgagtgygtgygtttttttgygtttttttgattgtyggtgttggggttttgygttttgygttygyg

SEQ ID NO: 11046 - DNA, 1813 bp, Artificial Sequence
  Description of Artificial Sequence: Synthetic polynucleotide
gygtttagtttygagagtttattatagtttaygtttgggygygtagtattttttygatattgtttttgttgtgttagatagtggtagtgttgagtttaggaataygygyggagttygyggygattttygyggtygtttagttttygyggyggatttyggygygtaggagttattgggtygtaagggygtyggggagygggaggggygttgggggyggtaaggggttttagattttaggttaygaattgtttttttttttttygggtaagagtttygttttttttaattgatagaaatttattggggtaggggggygagtggggagagaggtygtttagggttygttattggttgygtttttttyggttttggtttgggaagyggttttgggtttttygggygagtagtttgggygtyggygttttttgygaggaagatygyggggtgayggtyggtattygttyggttgggtygygttgtygtttygatttatttttttttygygttygygtttttttttttttttttattaggagttygggattyggagagggygygggaggtaggtataygggttygattttattttagygtttatyggggaygygggygggyggygaygggaygyggygggggygyggggygggygyggttatggagtagtagyggyggyggyggyggyggyggyggtaatattagygatygygggyggaygagygggygggtagggtygtygggtttagyggatygaattgtatagtttagtaaaagygttttygtttttygygygtygttttttgygagtttaaatttattaatattttttaaygttttaatttattttttgaagaaaagtaaaaaaaaaaaaaaaaaaaaaaaaaaaagtaaaaaaagaaaaagtattgatyggagagayggggatatatatatatatatatatatatatatatatataaaattttttttggtttttgttaaaattagtagggttygtygygygtttgtgtgttagtgtgtgygagtgtgtgtgygtgygggygtgtgtgtgtgaatgtgattattttaggatttttygggtttyggagaygttatttttttttttgatatttttttttataaatyggtggygyggyggaggyggtagagtygggygggaagygyggggtyggtyggggygttygtygttygtygtygttttygygygttygggggtttyggygtttttygagttagggyggttagttygyggttygtygtttgatagatgtttatygttatggagttgtygtagtagtatttttgggggttygggygagygaygggagtygggatttgagygagygtyggggttagyggagtyggagtygtygggatatgggtgagtaygygyggygattttggttygggagttygggygtttagttttttttygygtygygggttttygtattttyggaatygggggygaygtgtgtgttttgtatgtaaaagtttaygtygttttgttgggtttttgattttgtattyggygggaagggggagatygggtygagggggygggatgtyggttygggygaggttgtaggagatgggygygatttyggygggtyggygggtgggyggygatgttggtttaattggagtggttygttggtggyggygatggtggaagttttgggttggagggttgggagtttattgagtttygtttaatttgatttatttttttttygtttttygttttttgtattttttttyggttttgtagtyggttggyggggttggygggtttggygttggtggagtggattyg

SEQ ID NO: 11047 - DNA, 1872 bp, Artificial Sequence
  Description of Artificial Sequence: Synthetic polynucleotide
gygttttgttagttaagtygggtagttagggatttayggagtaaagatttaagygggtatggtttygataaagagtgaggttygttttttttttgttgtttygttagttattaaagatgagtgaggyggaaataygayggtggggagygyggggaatggaaaagttagaaggtttygtaataattyggtgttatttgaatgtttgtaaaaygtgtyggtaaaggtagttatgtttttatttygattttggtttagttgttygggataygygttaygyggyggtygttaatatttaggggatagataatagttatattgtattgatagtaygtagataatatyggygaggtgtatatttatatatttaaygataggtttygttattgygaggyggttgttaatttggagggaatagggaaagttagtygggttttagtttttttttttygaagtaygtttatttaaaygtygtagtttgygtttaggttgttttygttttattttaaagattatgttaaygtaggaattgtgggtgygygygggyggttyggyggggagtttttttttttgggtttygtyggttttattttgggagygggagggggaggagggagggttggaggaggggaggggaattttaaattaaaataatttttagttatgaggaygttyggtggtatyggatatttatattagtaatagttatattatattygttttygttagatggyggygggtttaatttttygggatttygtaaatttaggttgtgygttygagygygygtyggagtgtgggtaygygggygggttggggattgygggagyggygyggygyggygygagttyggggygagaaygggggygtggggttggggggygtygggtttatyggtttyggaygaggaggttttygttttyggggagyggtatygggtagtttyggtttagggtgayggtttygyggaagttggggtttagtygggttattattagtttttgtatggtttggggaatggyggagttttggaagtttaggaagtggygggygtaygatatgtttaygatggttygggtttyggtgggtattagtygtagtatggtttgygttttygttygttttttgygtygaygttggtyggggtyggttttygttygggtygttyggttyggttgtgttttgttyggttagggygggygggttygtttttttttyggtyggygttttttttttggtttttttttttttygygtygttygttttygtttttttygttttttyggygtyggygtagttttygtgaattygggygtattatttygggtgtttyggtttggggatygttgtygtttyggtygttgtttttttaatttttttgttttggtttgaatttgttyggygtagattggttaaggatttttttygtttttttttttttttttggygygggagaggtatyggatatttttatttttttygagttttaaaagtyggatttgatttttttygggtaagggtggygggggggayggygggtaaggggggaygggggattygygygtttygyggtygtttgyggtttygagtyggyggtagtttygggygttttyggagttgygyggyggtyggygtaggygtttttttttttygtgygaagygtttatttttttgtaaggtggtaygaattaatttygagygyggttygggyggyggggtaygatyggggatttygggtagggyggggagtttttgtygtygttgtygtaygygtattygtatygatygyggggyggggaaatgtttagtgtttttygttttttaggttggtggttttttgttttyggaattttttgygygtgttttttgtttayg

SEQ ID NO: 11048 - DNA, 652 bp, Artificial Sequence
  Description of Artificial Sequence: Synthetic polynucleotide
tygtagatygtgtatttttgtagggggtttyggatgygatggagttgygygagttgaygttttgggttgggyggtttttaggttygygtygtygggyggggtttyggyggyggygygygygtgygyggttgggggygyggttttgygggttgygygagttggaggtgygygtgagygagttgggtttgggttaygygttygaygagayggtgttgtttygttattgygtaggygtttgygaggttgtygygygygtttaygatttygggttgygaygattgygttagyggyggygtttgyggygggagygggtgygygygtagttttgttgtygttygayggtttaygaggaygaggtgttttttttggaygygtatagtygttattatayggtgtaygagttgtyggygygygagtgygtttgygtgtgattttattttattyggtyggygyggyggttatttttttygtttygayggtattattggtyggtttygygaaagattgygygtgygtagagtaygtyggygyggtttygggattttygygataattgtattgagataaagtgtggtaattygagttggttggtgatttattttyggygaggggttygygtgtgggttaygtygtygtttttatygggaaagyg

SEQ ID NO: 11049 - DNA, 722 bp, Artificial Sequence
  Description of Artificial Sequence: Synthetic polynucleotide
gygtttatttayggygygtgtagggttttaggtttagggagygagyggggygttatgggggtyggagtttgggtttaggtygttttttttttaattttttttgggtttttttatttygyggtttttttyggagygtggtttatygggygtgaagagygygatggttttgaggtagttatattyggtygagtygatttgtaggyggtttagtttgtttatttgtttttggaaggygygtatttggtttatgaaagttayggygygttyggyggttataggygyggygtggaggtyggyggyggttagtagyggygtygtgtgtaggggtagygtygtttgygtygygtttagtaygaagagttygttttagtttaggygtagtagygttatttggtyggttatyggtagttyggggaagaagggygygtggygygtttattttayggtgttgaagagtagtygygtygttagttygtataygttgtygatgtttagtatygygttygtygygtygttttttgygtygaagygttyggtygtygtagggtagggtttagygygtagtagttgygygattagttyggatatyggttgtttygggaagaggttttygtygttygttattgtygttagygtygagttyggggggttgttygaggaggyggttayggtattaggtagygagtgygggatgyggtygygttgtatygttgygggaggyg

SEQ ID NO: 11050 - DNA, 858 bp, Artificial Sequence
  Description of Artificial Sequence: Synthetic polynucleotide
aygattaygttatygtagattagggttataygatagatttygtttttatttatygttttgagttygattaaatagtatttayggtatatattagggttttygttttttatatatatatattataatgaygtygtaaataatagtattaattattatygttygtagttttygygtatagaggttttaggttttyggttttaygtggatygatttygttyggtagygyggggttattttatygygagtttttttygtagttyggttygggttatttygattygttaggtttaatttaataattataatatyggaaaaggaagtaaaggtygaagtttattygyggttttgaggtttgtgggaaaygtagtttaataaygaaagagttttgaagtttaagyggagttygttggtygtaggggtygtattaygttttagattttggagttttygggtgygtagatttttgttattagtagaggttgtygttgygygttttttaggygyggaagaggyggttggtggtttttgayggtaaggtgaagtygaggtagtaatygggaatttaggttgggaggatagaatggggaataggaagttggggygagggtggttttgggggaggtggggggtygyggaattttaggtggtttttgttttatttttggaaagaatyggaagttygggtyggggagggtgaagggagtygyggattyggttgtttagtygaggaggaaattyggattttaggttgagggaggtygaagaaggaattggagggtygggttgggaaggtttgaagygggtatagtttttaggttggggagggtygaggggagaattyggagtttgagtygggyg

SEQ ID NO: 11051 - DNA, 598 bp, Artificial Sequence
  Description of Artificial Sequence: Synthetic polynucleotide
tygaggtttyggygggttttygtatyggttttagtttttttttygtatttgtttggtyggygggttttatttttttttttgttaggggtagattttgggattatttagttygttttygtaggttttgagygtttgaygtttgygtattgagygygggygggygggtatttttagaaattttyggggygttgtaggygggataagtaggttttataggtygagtttaygagtttttygaggggtgagyggttygggttttttggygttttggtyggttagttaagygttggattatattttttagaggtayggygttyggagygttggattatattttttagaggtatygttttyggagygtagttttattttygttagtttgygagatttggaggtttygygtggggagagggtygygtttgtggaggagtttggtttygtatttgttgggttggygaattygaaattgggtttggaattygggagttagattttggattttgaattgtatttttgttaaggtaggagtgttygggatgtyggagyggataygygyggagaaagygtygttggggttattygtgtggtygtgttttyg

SEQ ID NO: 11052 - DNA, 1281 bp, Artificial Sequence
  Description of Artificial Sequence: Synthetic polynucleotide
tygaaagtttaaagtttygggtttatyggttagttttttatttygttgttgggtyggataggtgtaggggaggyggattygtttygtagtygatttatttagttttagggtttggtygtatttgagtagygyggttttyggttgttgttggygttgtaggtttygygtttggtttgttagtttgygtagtyggtattyggtygggaagtatttttttagtaggtygtttagtattaygtttaygygtygtatttgyggtygygygggttttggttttaygtagygtttgtagattgtgagttygtagggtagygttatyggtttatgtagtagtygtyggtagygygggtagtygagtaggtygyggggygygyggggtttyggggtyggttttttttygtygggygtttygggttygtygttygggtttttygyggatagyggtyggtygygtaggtttayggygygtattaggtygttygttagtttttttagttttttyggtygtagygtttygagtygygyggygtygyggaaygygtttagggtttyggggaggyggtyggygygggttagygygttttttagttttaggtataggtygyggttyggttgygttagttyggttagtatggagygaaagagttyggttgttatttygtagtygttygygyggaaggtttygtygtttttttttaagygttgggygatyggtttygygyggtygtagttaggatattggggyggyggyggyggygggatyggttyggggtttattatygyggggttgygaygaygygggttyggagygaaggygyggagtagggaggatgygttgttgttgggaattggtyggygggagygyggttttagttttygttagtagttaygygygtttgggggyggygygttgygagyggttgagatygygggygggggygggygtttggtttgggtagygtttttagygyggtgtgggyggygagtttygtagggttgtaatygtttyggggtgggggtygggataggtatygygggygtaatttgagtttttgtttaygygtagyggttttttagtttygtyggtttaggtaatttaggtygttgyggtaaygtagtgatygygttttaggttygygttttttgygatgttttttttattygtttgagggtttttgygygattgygygygygttttttgtttgtygttttttygtagaggtgtyggggttttgggagtaggtggttttggtygygggttgttggygygtyggtatygyg

SEQ ID NO: 11053 - DNA, 1788 bp, Artificial Sequence
  Description of Artificial Sequence: Synthetic polynucleotide
tyggttaggttygtyggtygttttagtttagtattagggygttygygyggttgttaaatattttygggagttttgttygtaaagggattaygaggtagttgttggygygttttgygygtattygtttagaggtttttyggtttgtttttygygggtttgtttygaaattgaygtgaaatygatttggtgtaatgygaatgagttttygttygttttygtttttattttagtygtygtygtygttygtygttataataatyggtttttattttttttattttaygttttgtttttygggtttttygggttataggttatagygygggaaggygtttygttttyggygtttygtattyggtygtygygtattttygttygttyggygttttygagttaygtagaggygttttttttygtyggagaygggaaagtttyggygtttttagattgggtttygtttttagttttyggaggggttggggttttttygygtgygtttygtatttgtygggggttygtattygttttygtyggggttttagggggtaygayggtygtggttyggygtttttgggaggggagygggatattttygaaggyggygygttggaggyggggagyggtyggggygtayggagagggyggggagttygygggagggggaggagggggaggagggggaggaggygygaggtgggggggagygyggygggyggtagggagggagygggagggaggtaagaaagtagtagaaagtgaggttggtaggyggyggtaaaggagtyggygygyggyggyggtaggaagtttgtgttygagaatagtagaaataagagttagggagggatygyggtygyggyggyggyggygagagygaaagaggaaattgtagaggaggaagttgygtygtagttygagtygttyggtattttygtygtttttgygttygygtygygttttyggygttttttttttagygygttttyggtygttttttygygtygygttygtyggttatggttygggagaayggygagagtagttttttttggaaaaagtaagttgaagatattaagaagattttygagtttaaagagattttyggaaygtaagtggggatyggggaggygagggtggaggtggtygyggtaggggttgtaygggtagttttagttgtygtygtygttattatygyggtagaaatttagtttgttatygygtttttattgtttygttttyggygttgyggagttttttygagygygttygaygygtgggtttgygattttygggtgggygtygttttygggagggggagggggtagygtygggttgttagggagtagtttaygygggygygygattttttattttttttgttatygtygtttttttygttgttttttttttaygygtgattgtgggttgagtatggtggggatggttgtttatyggttgtgtgygtttattygtygtgtgtatgggygtatygygttggygagaygtggttaygagaagattagtttttagtygtttttatttttgtttttatattatgtatttttatggaattggtatttgtaygtaygaggtgtaggtaagattttgggtggttaygygaggatggaagggaagggtttygtagtgtttagggttataygtgggtagagttttatyggagggtttgtgtattttaygygggttyggtygtaygygtyggggagygygtttttaagggagggtttgtgygygtygttgygygggyggtgtttttttygggttgtatyg

SEQ ID NO: 11054 - DNA, 626 bp, Artificial Sequence
  Description of Artificial Sequence: Synthetic polynucleotide
tygttyggtttttygygtagtygtgggatttygaggagggygtttattaggtygygtgtgattatgtaaggtaaatagggggtttatgaagttattgaggattaatggggagttyggagtagagtttggggyggggtttggttttggyggygggygyggattggtaygttgyggatttttttgttgttttataaggyggtgygaggygagttatttttagagggttatataagggggttgaggyggtygttyggyggtygggtagygygagygtaagggatagggagggtygtggygatattygygttagttttygggayggttgggttygggttggtygtygattttygattttttattagatgtttggtagagttyggygygttyggagttygygttttttagagggaaggggtygygygtygtygyggyggttttgaggttgayggtygggaggtgaaaggtyggagtgyggggttaggaygttttttggagggggygyggygtagggggtygyggggaagtygtygagggygyggagygggaaggaaggatagtggttatttygttttygtttgggtayggggtagggattygygygaggyggtgtyggggaggtttttayg

SEQ ID NO: 11055 - DNA, 1037 bp, Artificial Sequence
  Description of Artificial Sequence: Synthetic polynucleotide
aygaagttttygygaattgaattgagagtagataaaagtaygygtttttttttatygttaygtyggttttatttaaattygygagttattygtatttttttttaggagttatagttaggttagaagagtgyggagggayggggttygggaagagtagggaatttttagagttygtagttaaygyggaggtgggygagygggygtgygygtatttatttgtyggygygagggagtgtygggggggaagggagtggtttttaaaagggggaggggagaaggtagggggyggggagaagtyggttttttaggattyggttgyggyggygagggaggaggaagaagyggaggaggyggttttygygttygtagggtygtgttatttgttygttygttygttygttygttygttygttgygtygygttgtygatygttagtatgttgtygagagtgggttgtttygygttgtygttgtygtygtygtygttgttgtygttgttgttgttgttattgggygygagtggyggyggyggyggggygygygyggaggtgttgtttygttgttygttttgtatattygagygtttggtygtttgygggttttygtyggttgygtygttygtygyggtggtygtagtggtyggaggygttygtatgttatgygyggagttygttygggagtygggttgyggttgttgttyggtgtgygttyggttggagggygaggygtgyggygtttatatttygygttgyggttaggggttgygttgttatttttattygggtttygagttgtttttgtaggygttggttatgggygagggtatttgtgagaagygtygggaygtygagtatggygttagttyggagtaggttgtaggtaaygyggtttggaataagtagttgggagaaatttggagggtagyggagaagttygaygggyggttggattttayggayggttttaggggyggtagagtygagattttggattaaattaagggggattgttgttagygggaygyggaagttaggttyg

SEQ ID NO: 11056 - DNA, 977 bp, Artificial Sequence
  Description of Artificial Sequence: Synthetic polynucleotide
tyggatttgayggagtaatgtaygtgggtttttgattygtaatatatttagttaaagtyggtttttattgttaagygygttagtagtttatatttattgyggtygyggtttgatgtggtgatgtttatygygyggtttttataatgtagggatttttttgagtggtggtygttttygttttagttttyggttattygtagttttatatygggttattggtttattatygagatagttagygagtttaggyggtttttgtagygttgggagaggaatgtgygygaaattaattagagygaaattagtyggaggagtyggtygaggtgtaggtgtaggygtagtttygtttagaattttttygttatatttaagggagttggaagttygggagggtgttgttttttttttttaggaatagagggttttgaagtgttttttttttagtatatagtygttttyggggatttggatygtayggyggtattataaatttggaggaggtatggaggtaagygttttggyggygtttttattggtaggtggaggtttttttttttttgtgttgtttttagtttygggtatttatttttttatagataggattatattttttagygttyggtttttttgtgtttttaaggtaggagggttagttagyggtygggagggaggagtggtagtagagtygattgtttgyggtyggtttgygaggygtgtaaggttygaggtgtttagtaggtgttatygtagttttagggttgaggtttggggaygataggttttggaggygyggtaggtgtagagygtttyggtagttttagggggtgtgttggaggggaatygtyggtttgtttggatttttygagtattatygaggattttygtygggatttttttataattttaaatyggtttataatttygttagagatgatagggttagggaattagaaatyggyggattagygttagggtyg

SEQ ID NO: 11057 - DNA, 6206 bp, Artificial Sequence
  Description of Artificial Sequence: Synthetic polynucleotide
tygtttttttgyggtaggygaggyggggtgtaggtgtgagtggggtgggaggaaggggaaaggatyggggtygtygtagtttttttggttagtttygttgggttttgttagtttygtttgagatygaggygtayggattagyggtygttagtattttataggtggaggatattttttgygttttaaggttaatgttatttygatgggtttygtgtygttttgattttttttgatttaattttttggttatgatttttttattttttgggtttygtttttgttagttttygtygaygtygtttttttygtygttygttygggtttttttattygtttttttttttttttggttygayggttttattgaggtaaaaataaatagttttgagggtattttaaggagygtgtagtggtttygayggtattttyggggggataaaagaggtggttagttaygtygtyggttttyggtygaataatgggygygtagtagattgttagggggtatttgaaattygaggggagggaaatatttgagygyggttttttttygygaggaygtaygaygtagtttygyggatygttttttgttygtttttttttatgtattttttttttgtgtggaattatttaaaygggagatttttggtagttttatgttaatgygtygaataaaggtaayggttygygggygggaggttyggaaggtgtttggggtygggtygggyggggtggyggttaggygggttgygygtgtttttygygtgtttttgggattgatataataattttttatttttgtaaatataaagttttttatyggttygggtygggygtattyggygtagggaggygttggttttttygggyggygggtattgtagyggtaaygtayggtttttgtyggttgtggttygggggattgagggtygggagtgggggtttttgtgaagttagaagagaagtttgtagtagagtggtgatgaggggygttgatattttatttttaaygtygaygtttttaaaygygatattttttgyggggtgagaatgygggttygttyggtttttttygtgaggttagggttttttgtttttttagatattttaaggagttaattttttygtagaagtttttygtttttgtttttatttttaagtttygygttttttataaattttttgttgttttgattttgatttttagtygtggtgagggttagagtgaatttyggygygtttttygayggtattttygtatattaggataggagaaattggagggtttggggtttygggtttygtagtygtyggaggaagaatttatygyggggttygtaagggaaagtgaagaggttygggatttttttaaagygttggttaggatttygaaggaaggggaggagttatttgaagtyggggaaggttttttgggtgttttgttttggatttttatgtttattgattttygygaagtttttttggaggggggtaaattygygttgttttttttaatttaattttaygyggtttatttttygaatygygtgygttaaggtyggygtygggggygtattgtgatggygttttgttttttttaggygaagataaatatttygattygatgtttttatgtatgygggtgtataggttttgagaaaattaygtagaaggyggttgygatttayggttygggttgggttatatttgtttggaggtygttggtgtgtgygtgygygygtgygtagtttaattttttttagtttygggtggtgaaattagtttttaatattagtattttttaagtttttatttattttgattgtattygtttgaaagtagattttatttaygttagtaagattggaagttataaataaagaaaaagaaayggatttattgaattttagtattttagtagygtttaatagatttttttggttaaatttagagttttgtttgaatttatttaygtaggagttgttttgttttttttgttggtagaggtgtyggttttttatttttayggtttatttataattatgggtgttgttatttttaaaggatttataaggtgattaattttttgttatttgttgaatggaaggagtgttatatatgtaagatygaatggggtaggtygagttttygttttatgttattttataatttagatgggattygtgattagaaaataaaattggttaaagttgtttyggaattttttttttatttttaattttattagtattattaattagagtttaaaagagtaaggaaataatattagttatttttagatagaaatatgtttataaattttagataaatttattttaagatttttaatttttggggagattagtatttattatagtatttttaaaattagggtgagattttttaaaatatattttattatatgtatttttttttttttagtgtgtgagttaaaatattataaatataaaattattaaatattttttttttgattaattaatttgattaattttttaattaattaagtttaataattgtttttattataatttatgatttatgtggattttatttttatatgtttaatttttaygttagggtatttttagagggaaaatttaaaataattaaatatttttagtggaattaagygtaagtaaaatttagtaaaatttgtttggtatataaagttttgtagaaaaatgttttttttttttttaataaagtgatattttttttatagtatatgatattttatgtggtttggttatttgttttttagtgttggaygattagggttattaygtattygtggggttttttgttttgtttttygaagattttgttttttgtgttttttyggggttgggttggatagaggatggaggtaggyggtttagtttgggtttaaayggaayggtagtggaggtgggggtgggggtgggggyggggggaattttygttgttgtttttttttggtggtataggggaggyggtttgttttttyggaggttttagtttgttttagagtatagattgtttttttttttttygtttagtaygygttttttttgygtttagattggtygygatyggagtttaatagtaggaggttaattttttttataaaggtgaagggggtayggtttygtgggggttgygtttagataggtagtttttttatttygtagygttttgattggagtttttgatttagtatttgatgttaatyggtaaataaaatgttygttyggaatgaaaatgtatgaggtygygyggggaggagaaagttaattttattggggygtaygaggtygatygygygtttygggtttyggttaattygattyggattaatygagttttggattaygyggaagtttygggyggtttgggtygggtttygttaaagatgttatttttaagtttttaagaatttaaaagtttagaaatttaygtttttttgggaatttagtttagttygttygygttttaatttygygttttygggagattgagaaggtygtgttaatttttttttaaattygaaagaaattttttttagtttygtgggygygyggaggttgygagtataaatatygttttyggttattgttagaaggtygggttttttgtttatatttggaatttyggggaatttttttgtttggttttttgggtttagyggtttattygtttaaggttygggyggaggtygttyggattttgttgttttttyggatttttgtttattttttaaatattaygyggagttattgygttttygtaaygatttttttygtatygtttyggygygttttygtttttatttaattagygygtataatttttttttyggtttyggttygyggattgaatttttttgatatatttggggttattttttttttttgttgttattttgttagygattygygggtaattttygygygggaggggggygtgtattgtygygttgatggaygggtttatttggyggtttygygtttttyggaggagagatataaagtttaggtaygtgygtttttttatagagaagtagtagatygtgaagggaggyggggtygggygtgtgtttggatygggyggggyggyggygtygggyggggygattaggggygygygygggggtttygygtttttaggtatatttgtygtatttatygggygattttygagtttyggtttttttttggtygttttatygtttttttattttgttaggttgaggagttgyggaygygttgattggttttaggggaagygggaggygagaataatggtttttttttttygttaaaagggagyggttgtygggttyggggatagggaygygygtgtagggygtagagttgggtygagtygtygtyggygttaygygagtttygtagtygtygygttygggtaatgggtygggggtattgagggtygtyggggtygagygyggaggggggatygagttagtgtygtgttttygggtygygttaatatgtttygyggttttttggtgaagygtagtaagaagtttaygttygttttttatygggttygyggyggygaggayggygatygygtattgttgttttygtttagttgygggggygttygygtygagttttyggygtygagttyggttttygggtygttgtygtygtygtygttygyggagygygtttatgtagygttygtygtygygtttgtttgygygtttgggtygtagttattttygtagggttygygggtygygtatttyggtaatttygaggttgygtatttygygtygttttatagttttaygyggttygtgagtygygagtaygagaagtataagtatttygaaygtagttttaatttgggttygtyggtttyggtygagtttttttttaygttygtygygttgttyggagggggyggyggyggyggygygagyggagttggyggaggyggtatttgyggyggygattygttgtttttygygttygtygagtttaagatgggtayggygttttyggttggygtygaggyggttygyggttygggtttyggttttttattgttttttgtygtygttttgyggttttygggaaagyggttttygttttttatygtygyggagtygttygttaaggtagttaaggtttygggygttaagaagtttaaggttattygtaagttgtatttygaggaygaggtgattaygtygttygtgttggggtttaagattaaggagggttyggtggaggygtygyggggtygygyggggggygyggygyggtygttgggygagtttatttgttagttgtgtaaggaggagtaygtygattygttygygttggygtagtataaatgttygygtatygtgygtgtggagtatygttgtttygagtgygttaaggtttttagttgttyggttaatttggtttygtatygtygttggtataaatygyggttygygttygtygtygttygygygtyggagttagaagtagtagttagggttgaggygygggaggtattyggyggyggtagygatygggataygtygagtttyggyggygtgttygagtygggtttygaggaygggttttaygagtgttattattgygttaagaagtttygtygttaggtttatttaygtaagtatttgttggygtattattaggygttgtaggttaagggygygtygttagygttttyggtygaggatttattggttttgtatttygggttygaygagaaggygttttaggaggyggtyggygayggygagggggtyggygtgttgggtttgagtgygttygtygagtgttatttgtgtttagtgtgyggagagtygttygttagtaagggygtttaggagygttatttgygtttgttgtaygtygtttaggtgtttttttgtaagtattgttyggttattttttatagttygttyggttttaygyggtatattaataagtgttatttattygaaaatagataggtgatttttttgtaggtgttygtgygttyggtttgttagagygygttttttatttyggttttygaattgtgttttygtttggagatttataaagagagtgygttttgtatttttygaattygagttygygttgggggagtttygttttygtttttatygggtgaaagtgtygttttygtttttttyggtgtggygtgayg

SEQ ID NO: 11058 - DNA, 574 bp, Artificial Sequence
  Description of Artificial Sequence: Synthetic polynucleotide
gygtttttttttttgttygygttttyggttttttygttggtttttgttygagtttttagtttttttgtattataggtttttggggtttygtttyggattyggttattttttaggttyggagtagtygtygtggaggtygttttttygygtttaggggaagggaaggyggtttyggggttygttgyggggtggagggattygygttttttagtttttygggttygggtygyggggatygtgygygygtttttttttygggtaaggtygggyggygggygygtygyggtttttggggttttygtttttttgttygttatygtttgygggagtttttggtttggaggggttyggggygygttggygattgygggttyggygataggggyggttggtggygggaggatagtgggaggaaggtttygttttaygygtttttttttyggatgtgattygtyggggtttttygtagtyggggygagyggtttggaagttyggaggaggggtayggaattgttygatggggatgygatygygggygttagaygaattgtttttatattygttggygttggyg

SEQ ID NO: 11059 - DNA, 3438 bp, Artificial Sequence
  Description of Artificial Sequence: Synthetic polynucleotide
tygttggtggagttygtttttttgaagtyggagttggygagtttttygtatttgattttgtaggygtttttttygygggttagtygggatattttttgtttaagttgttttatttgttgaatgagttgygtttttttattttttaggtggtgtttttgttggaygygtttatatttgtaagattgggygtagtttyggttttttagggttygtygtttttgttttaggyggattatttygtttttggtgaagtttygtaggtggyggtttagttygygtayggatatggataygagttggtygtyggagaagyggttttttaygttgtygttgtygttygtygtygtygtygaggtygtygygtgyggttygggttyggggtggttagtgggtagttgttgygtygggttagyggygttggayggyggyggygaygtttggtgatgatggtgatggtgygggtgagygtgygggtttagttygtygtgggttaygtyggygttygggtaygtgtggtgygggtgagggtggtggtgatggtggtggtggtgagygtygygaaagttgtygaagttttgtagyggttgtggtattgggtgygagtygatgagygtttttatygygttttygggygttaggttgagygtttyggggtttatttgttggtagttgttygttatttagtatagattttygaggtgtgttttttgttyggtygggttgaagttgggygaygagggtayggagttatayggagtgttgagyggtgtggaggatatygagtyggttggttgtaggygtgtgtagggtttgttyggaygtttygygygttttagtggttttttttttaygtygaatttgagtaggtygaagtygttgatatattttatggttagygggttggtgggtagttttggttttatgtttagtttygyggttatygttgaagygaggygtagtygtygttgtygttygggaaattttgyggtyggtyggagygygtygagttaagygygggggggaagagyggagaagagttggggaggyggggagygagggygtagygggtyggggtygtyggttaagtttttgtttggggaygyggyggygygtyggagagtttygaggttgtttgtatygttttagagttttgggttgtgttygygtagggatygggtygggtagagtygggyggggtggagaggtaagyggagygygyggtggggttgaggggaggygtggggygagtgttygttgttygttttttagtttttttgtttttaygttttttygttygtagtygttygtagttyggyggtgtagttgtgttggattyggyggygtygtagttttttatygttttttgatgttattggggtgygggggttygggyggttyggtgygygggttaatagttgtayggttttygyggtttagyggygtagggyggggygygtttgatagttttttygtttttygygttagttgattggyggttygagyggtttyggagyggyggaggtttggyggagygttggagyggagtgggayggttagtttgggtttattttygtattttgtaggtttyggtttaygtaygttygtttggagtgygygttttatttttaggttaaattatygttttttttttttygygtattttttttttttagttttttttgtattttatttttatttygtgttatttttaaggaggtttagaatgagygtygggataaygttttttgggttttttgtttttaagyggttttygtttagtgggygaygttttgtgtgttttygyggtttttggtygtgtgtgtygtgygtttttgtttttggagatttgygygtatttgtatgttggggagggygggttygaggtttygagagttgtgtttagatttaatttttaattttaggggattttttttaggttaagygagggttttttttggygggtgtagtygtagagttttgaggttygattttattggtttygtygtttttygygtttattttatygtataatgtttatagtgaaggygaygggaaaagtagtagtttaaaggttttgaatttttttttttygttataygtayggaattttgagttttyggagtttyggggtygaggtyggttygggayggtgtttygagtagttttttattgttggggagtyggttttgtttttgtttgaaygttttgtaaygattaagtagatttyggygttagttygtygyggagaggtttaaataggtataaagtgygattttaagtggttattgtgygtaaaggygtygygatygttyggtttayggtyggaaggtttggayggygtttygtatttagttaggttttttttatttggtttaatttaagttagtttagaaygtatattatgtgtgtattagagtttaggataggtttttttygagygatgtataggttttygggtttygttttygtatttagtygygagtttygagtygygagtttygttttggtygtttygttgaaatttygtgttttagygttygggggtgttygtyggttgttttttgggtyggaaggttttgggyggaggaaggtyggtagttaaaagtggaagygttatagtgaagyggtttagggttatygggtgagaaattttttyggagggtagayggggagatygaagtatatygtattaggtatttagattgggtttgggagtygygtattttttttatttagatttaggatggttagaattaaygggttttttttgagatttyggtttaggygtygaaatyggatagatygygaattygttggattyggagattygattygtttttygygttatttttttttttttagttttgggygygygtagygaaaggtaggagaggygygtattgggtgagtgagtttyggtygttgtttgygttggattagttygattgatttygygygtaggggtygygtgagttatatyggtgtagaygygtttagattatttttaaatgttagaaggtaaaatatttgtttttaattaatttgaaaattttttatttttttgygttttyggagaggttggggtayggygtggtattgggtygtttatttttaataaaatgagtgtattttaattaaaatttaatttaattttgtggggtggtaaattaaatgttggaagagygygtttataatttttttygagaagygtgtttttygtagaaatgagtyggtygtttggagagagagtttgggyggtgtygttgygtagtttttgttagtagttgggggttggggattygtattttgtaaatgttttygttttgtttgaaygtagtgagagtatattygtttttagattattygggatygggtgtttyggatttgtgtagattatgtatggtttyggttttaggyggttagggygggataagtayg

SEQ ID NO: 11060 - DNA, 4088 bp, Artificial Sequence
  Description of Artificial Sequence: Synthetic polynucleotide
aygtttygagtatygattttatagttayggttatygtttttyggttttygtgatatyggygygtttgttgtttygagtaggggaggttttgtatttttatygtatttttttygttygaagataygaaatttygttygggygtygtaaataattygaattyggttttttgatatttatttyggygggygygygtygttgggagggyggggtgggtggttggaggtaaggaggygtatagtaggggtaagygtygtygtygtatattttgtaygtygtttagggttatattatttatygaaaattgggaggtaggtttgggaggyggggttgagygtttatygttttgggygygttygygtttttygttatygyggttttygygttttyggtttaygttygygyggtttyggtatyggtttgtatttttagggtgygyggyggtttatttgggtgygttttyggtgggtygatttttygygtttttttttyggtttataggggtygttgttatgggtyggttttttgaagaggttggggygttatyggggtyggttagaagttttgtttttyggyggggatatttagtygygtyggtatygyggagygggttgygttaggtggttggtyggygyggygtttttttgttttttggtttygggttgyggygyggyggttggagygagtttttgtttyggygyggggyggyggygggyggtyggtaggygttgttttgygtgtgagtgtattttatttatatgtaagtyggggagygtyggggtttttygyggaagtgygagtygttyggygtaggtaagagtygtygggttygggataaggtaggggygttygggygtygttgttttgtttyggggygttttygggtattttttaattttttttttttttttttttttattggygtgtttaagagttaaattaaggagygtttgagggtaaatagatttttgttattygygtttttgtatttttttttttgagttgatattttttggtgttttttggtttttygttgttgttgggtgttttttggtttgtttttgtttttttttygtttgtttattttttttggygttaatttttaggtagttagtttagtagttygaagttygggtagtygygtttygyggtttyggggtagygyggygggaatygtagttaagtttttygatayggggygtaygggggtygggtagttygaggtygggggtaagtagggagttygggttaggygygagtygagtttttygaggtggtygggttattatgttgaagatggttatgaagtttaaagttygggyggyggagagygagaagaagayggtygyggyggttgtygaggtggttgtygaagttgyggyggyggttgyggygttggtygagtygagagagtygttygygtygyggaagagyggggatttygagaagttygygaagaattttaagaattyggygygggaggygtttttygaaaagtttttaatagataaggagygtaagaagttygagaagaagttgttggagtagaggygaaaggaggagaagaagaaggagaaggagaggaagaagatggagaagatgttgaagaagaagaagaagaaggtgttagaagtttaggaggaggttygatgtttygaggtygtygtygtygyggtygtygtygaygaygatgagggygtygaggagggygtygtygggggygtygaggagggygtygtygtygggggtaygagtagggtttgggttgattgggatayggattygagygaygaggaygaygtttattaygyggygtygygygttgggggtatygtgtggyggttygggtygtttaaggttggygygttgagygtttatttgtttttygtggtgtttttggttttttyggtgygtagtttttygtgggtgtttaattttttgttgtagaagygtayggagtagggtygyggttgyggtttygtgttyggggygatttgttgttttygagtgtttttgggttgygttttttttttttatttgggyggtygygttaagygtagaggtygygggygtttyggggttagaggygttttyggttygggttatggygttyggygtygggggygygaggagyggtttatttagttagattttttatttygttatygttattagatattattatygttgtgtagtgtgggtttttattygtgttygtgtgtgtgtgtggatatattttttttttyggttgttttgttttttggttygtgttygtttygttttttttatatttttgttttttggttttttgtgtttttygttttttygaaaatttttttaagttygggygygygtttttttttttttygtttattttagtttttyggyggygttygygggagggggaggaggtttygggggygtygggygaygyggttyggggggtggagygttggygtygtgygaggggtygttattggygyggagaygtttttttttttttttyggtttagtygggttgttgttygagttyggggggtggggggygttttttyggttygtttygttttyggtygggygygggyggagggatttttttttygggttttyggggggtygttttttttygtyggttttygtttttttagtygtygtygtygtygyggtygtttttyggtttttttttttttttttttttttttatttttttygtygtygtygttttttttttttttygttttttttygttygtygyggygtttttggttyggggyggyggygggggttyggtygaggtaataagagyggyggyggyggtagyggyggtagtagttttygtagtttttgttttggttygtttyggttyggyggyggttattagttttttyggtttyggttygaggggyggggagttgygygygtttttyggttygatygatattttttttttttygttygttygygygtttygyggttygyggttygtagttygtttygygygttttttgtygaggagtygagttygygttyggttygttygttyggygttgtttyggttttttyggtttgygtgaggtygttygygttygtygtygtygtagttyggtygygtttygtygtygtygtygtygttatgggttgtttygggaatagtaagatygaggattagygtaaygaggagaaggygtagygtgaggttaataaaaagatygagaagtagttgtagaaggataagtaggtttatygggttaygtatygtttgttgttgttgggtaagggygggyggggggygtyggtttyggttygggggttttygaagggygtttygtaggtygygygygtygagttygtttttygtttygggygygygttttygagtttttygttygttygygggttttgtttgtggggggygaggtyggaagggggatttaggggygyggattyggtygggygggggtttaaaaayggggyggggggtygtggygaygygggygygggtttttttttttyggtttgttygtttagtgttttttttttgttttygttttygtttttttttttttttttttttttttttttttttygygaggtttataygaygttaggggtttgggtgygtgttggggagggggagggggagtttatggggtttyggagattgygataaaaagagggtttyggggataggaaatygggtggygggtagagggagggggattygttttygtggggtgtgagatttgttgggagagggaaagaggggaagaaaggggygaggagaggagggggtgaygttggggggygtygtggtggyggagggggtttygttaaagggaggttttggyggggagaagtggtygaggagagtgggggggttggtgatattagtttttyggaaaggatyggagyggtaaaggtggtgtagtgggggggagggggygtaagggagtygtggygtyggagtygggaggggggyggygaggggaggagggagggyggttgtygttgggygygatttggtgygtttygggtaggatygattgattgtgtgtgygyggagtagaygtgtttygggttaggtygggtyg

SEQ ID NO: 11061 - DNA, 522 bp, Artificial Sequence
  Description of Artificial Sequence: Synthetic polynucleotide
tyggttttatttygtttaaagtyggatttygtttagtttygtgaaagygaaggagtattagygttttttgatttygtatagttttttyggtagagayggttygttttttttaagaatyggaagtyggatagygttaggaygttttattttttttatttgggatttagagaggtagyggttaaggatagggttttygtygaggttatygggtagygtttaggtttyggtttttgggaggggagtagygggggaggggtayggggaggggygagggyggggygygtttgggtttyggygttgggttttttttttgttygtttygggggatatttataggatttttgtagatttttgtygaggtaggatggaggtttgtagggatgtatygygggttygygattygggyggtyggaatatagttttttttggtyggagatyggttyggtygtgagtygtgtttgtgttaggttttttaygttgtgttttagggttttagtgttyggygygtygggggttgtatyg

SEQ ID NO: 11062 - DNA, 2260 bp, Artificial Sequence
  Description of Artificial Sequence: Synthetic polynucleotide
aygttttyggaaagttttttttaatgggaagygatttygtygttgagttaagygttygaattttttttttygyggtagggatatyggttygggttaggtttgyggaggaygttttygggygygtatatatagttygaggaygygttttgtattttaagaygtagggtyggattttatttygaaatttggtttttatagttttaggtygaattgtgtttggtttttagttttygagttygagttttaygtygtaaagagatggggttttattgtgtttagttggttttttagtayggaygtgtatttttttttggtttgttttttgttaaaaatyggtagtgygtttygtttttttgtttagtygtagtttgtygttttttagataaaaagyggygatygyggttyggttattygagtttygtygygttgygtttttgttgggyggtttatagatggtgtttagtayggggtygygtygagggygggggygggaggtygygaagagggtygggygggaggggaggagayggyggagtagttaattygygygyggtttattagttgatygtttttgtttatattaggtgtaygtyggttgyggggagtataaagyggggygtatygygggygtyggtaaygagtyggtgaaygaggygaggttygtgygttygyggttgtaagygttygtttggyggggagaggggtygayggygttagttygggyggyggtatttttaggygtttggggygttttttttyggatttggtygttygttgtttygttttttgtattttattttttygatttttttttttagttttgtttttttttgttttggtttttgagagtygattgagtttagtttygtgtagtagyggttgtttgtgtygtygtttagttttyggttttggtgttttttygggggtgttttaaggagttagtgygygttgygggttgggaaggaggygtygtttagttagttttttttttttttttygttttttttttttttttgttgttgttgtygtygtygtygtygtgggtgtygggttygygygtattttaatatttttattagttgggtttyggggtaagtttttggtyggtygygtygyggtaggaggtgtgggaggtagygaggggaagtygaggtaaatttggtggygtgggagattttayggggtttggggaattttagggtaagatygygggtttgagggggaygagggggygyggtttayggagttggggaaaatgaygaagtygggaaaygagaatatagtgtttygttttttttygttttttttgttaaaaaaaaaaaaaaaaaggtgtgggagagygatagttgggaaggtaggttagatagaaataggtaaaaaaaggtagtgatyggagtygagtttgttggattttaggggtygattaggggagggaggtgttyggggayggggagggaggagggttgtygggatgtgaatyggggaaggtagttggggttggagagtagygyggaaagggggtttagggagttggaaagagggttaagaggagggtaaggaaggtggygggygayggggagaggaaagaaaaagggtgttttggyggtggttttggtaagagaaaggggtaaggggtataattgataaggtattgaaagtattgaagttagagttttgggaaggatttatygaattttyggyggtttaygyggggatagattttagttygtgagttttgagttttaygyggggatagattttagttygtgagttttgagttttaygyggggatagattttagttygtgagttttgagttttaygyggggatagattttagttygtgagttttgagttttaygyggggatagattttagttygtgagttttgagttttaygyggggatagattttagttygtgagttttgagtttagaaggagtggtagttttaggaygtttgttaggtggtttggaatgtgagggaagttttagtttygttaggaatagagttggygttgagttttyggttyggttygggttagaagygaggaaagtttgtyggygagtgttttttgtgttgygtggagaggggtgtgggyggtygtygattyggygttttttygtygttygtttagggagtttttgtttggtaagttggggttyggggaaaagtttagtagygagagggtygygtgtttygggayggttttaggggagttygygyggaaaygyggattaggygtttyggttyggatgtyg

SEQ ID NO: 11063 - DNA, 1502 bp, Artificial Sequence
  Description of Artificial Sequence: Synthetic polynucleotide
tygygggayggagatagggagttgggaggaaaygtaaygygttttttaggtaatagatttygagtttyggttyggaaaygtttygaggtagaagtaagggtttttaagggtttygttttttagttttgggtttttattattattttttttttagattyggtgagtttaggttgatggatygtgtagtttagtttgagttagtttagtagtttttaatygggygggtagggaagaaggttttttattgtygggaagaggttagygygttttaagtttttygtaaatttygtttttttygtttggtayggtttttttgtatygttgtgtttygtttttaggtttttgttygttaagaatgtttgtttygggggygygttygttggttaggaatttgtyggtagttttygggaatttttgaggatgyggaggtgggttygagagttgyggtttygatgtyggggtgggagttaggtaggtygygygtygtygtagttttgtygtagygygtgttttggttttttyggatygaaaaggtygaagtygtttttygygatygatttygygtaattggttygggtttgtatttagatggttgtgggttttatagggatggtygggygggttygttyggtygttattttagggtygttagttttygygygyggtygtttttygttaggaagggtggygggttyggaaggttagagatgttttagtgtttttygygtygttaygtatttagttgttygygggttttatatggttgyggtyggagggttygtattaggatygtygtygtttggggaagygtttttttgtgggtagggygyggygggtagtgyggaagttygaaagttatyggagttyggggtaggggyggygygatgtagaggyggygttygggggtttttagttgtttgyggttyggttatttagtygygattagagggggygggggaygtaggaatttyggygttygggyggtgtgtagtygtagatttattttaagtttttaygtagttgygagagtttaaaaattgttaygtgtaygtygttgttgagtgggaggaggtgtttgttatygygtttaaaaggggygtttyggtgtttttygttatgtaagtaaatggtatggttttyggtygtttttgaataaaygagtgtttygaattttttattaggagggattaggygtataattattttygatatttttygggtatgygagaattyggttttttttagtggggtttattaatgttgttygggaggtaaagaaagtgatyggttaayggttttagygtgggttttttttttttttygtttttttttttaataaaggaygtayggagaataagttttttagtttttatagatgaggagtttaggagtygggygaatattaagtatttattgtgtgtttgtttttttattttggggaggttgggggttygggagtgaagggggtagygagatygygggttgttttaygtttatygtyg

SEQ ID NO: 11064 - DNA, 510 bp, Artificial Sequence
  Description of Artificial Sequence: Synthetic polynucleotide
gyggtyggttttggaagaggtgggggygaggggtygggggtttataygttttgygatttttttttatgagaatgggygggggtagtttygggaagggtggyggatggagtygttttttttttaggattataggggygttttttagtgaaggygtygtaggaaaygttagtttgtgtygtagtgtaygtagaggygttatgagttygagttttttaygtttagggataaattgggagtygtgattgttaggtygygyggaggttgttttggtygtttttgyggttaggtgaaggygtagaggtagggaggtygggygagygtaggygggyggagagtagattaygyggaagaggtygagagagaaagyggggtattyggtygggggggttatttataagggaygttgggtaygaaggaggttggggygaagatgagtttaggggttgggttgagagygttgygtagtygggttgagaagagaagttgaygagtgattttygataagggayg

SEQ ID NO: 11065 - DNA, 940 bp, Artificial Sequence
  Description of Artificial Sequence: Synthetic polynucleotide
tyggggygtaggtaggaggtattggaagyggaagygagtggggagttygggtagagggagtygtttatttgatyggtttygtttttttyggggtttgttgtagttgagggtttyggattagygattttagaagtyggttyggggtygggtagtttaatagtttttygyggattttttttygttggygygtagtagyggygygtggattygygygygggttygggayggygygagttygggtagygygagtttttgygyggtagggagtggygtatgygygggygttttgygagttygttggggygagtygagtygyggyggygtygggagtygggyggyggagttgtgaagaagtaagyggyggtaygggagtagyggygayggataggtggygagttttygttygygtygttaggggttgttgggttattygyggagtttygyggtttagaygtggygggggtggyggyggtatttyggayggtttgtgagggatgygtygtttattgtttygygtygtttgatygttttygtttygattygyggtgygttatagtygggttygyggtygttttygtygygttgtygttyggtygtygygttygyggggtygygttyggtayggttatgtggatttttayggaggaggagaaatayggygtaggtaggtgaggtttaggtttggtygtggygggggttttgggggaygygtttagttttyggtttygtttggattygtattttygtgttttygttattgttygtaggttgygyggtttyggygtggggygagygyggggtgggggtaggtgygggtgygggtgygggtgygggggtgggygygggtttttgtgtagagagggyggtagggggygttggyggtgyggttttggtaggtgyggttygygggaggggtgggtaaggttygggtagttgttyg

SEQ ID NO: 11066 - DNA, 2718 bp, Artificial Sequence
  Description of Artificial Sequence: Synthetic polynucleotide
tygtygttagttatgatttatgttttagtagygttgggaagtgggtygagggaattgaggtyggggtgggtgyggaggtggttttgayggggagygtygatttaggatttggttyggattttgagttyggtaggatttgtgygtaygtaggtagygtygygtttttttttaggttgygagaggttgttttgttattaggttatggatttygagtygttygtgttgygygygygygtgtgygygttttygtttgygtttatgtttgygtygggggaggygaaggaggttttagttttagaaagagtagtttttggaatttattatttaggtyggtygtygttyggtttygtttygtaggttgtaggyggttttggagggggygttttygtygagygygygtttygygtygtygtttyggattttttttyggygtygygygggtaggttygattaggyggtygygggtttyggttttyggttagttttttagggttygyggttygtttygtttygygygttygtttygttgygtaattygatttaagttggaagtygatygtaggyggtygtattygygtttagygtagggyggyggyggyggyggyggygtagtttyggygagygaggyggyggtygtayggttaagygtggatygyggggggygttygygttygggagtagtyggaggattygyggyggygtyggygtttygttygggaaagtaaagttggagayggagggagygygygggygygggggttyggaggagyggyggtyggygtttyggygygtygagttttagtyggtyggatgggaggyggagygttygggtygtygtygtttgtygtttgygtttyggttgggtttygggatygyggggtygtttaggtaygttygttygggygtygygtygtygtgggttygaygtyggggygtttttygtgagtygggtygagggyggggtygygygaggatttygggatttgttttttttttttygtagtygygtygtygttygtttygggygttttttgttttgtatttataygttyggtagttgyggggagttyggtagttaygtttttyggygygtygttygyggagttattayggtygagggtyggttgttgggygtygyggttttyggygggygygttygagtagtaggyggygatgygggygtygatttyggttggggggygttygagttgtygyggttgygtttyggttttaggagggayggygtagttygygggaggattatggygttttyggygttggyggyggygttggyggtggyggtagyggygggttttaatgygagyggygygggygagaggggtagyggyggggttgttaatgtttygggggttttttgggggtygtygygyggttagtattyggygggygyggtggtagggttggttgtygtggtgggtttttttatygtttttatygtggtgggtaaygtgttggtggtgatygtygtgttgattagtygggygttgygygygttatagaatttttttttggtgtygttggtttyggtygatattttggtggttaygttggttatgtttttttygttggttaaygagtttatggtttattggtatttygggtaggtgtggtgyggygtgtatttggygttygatgtgttgttttgtatttygtygatygtgtatttgtgtgttattagtttggatygttattggtyggtgaygtaggtygtygagtataatttgaagygtatattaygtygygttaaggttattatygtggtygtgtggtttatttyggtygttatttttttttygtygttggtttygttttatygttagttygayggygtygtttattygtagtgyggttttaaygaygagatttggtatattttgtttttttgtatyggtttttttttygygttttgttttattatgggtttggtttaygygygtatttatygagtggttaagttgygtaygygtaygtttagygagaagygygttttygtgggtttygayggtgygttttygattatygaaaaygggttgggygyggyggtaggygtaggygagaaygggtattgygygttttygttygtygaygtggagtyggaygagagtagygtagyggtygagaggyggyggygtyggggygygttgyggtggggygggyggyggygagygggygyggaggggggygygggyggtgyggaygggtagggggyggggtygggggyggttgagtygggggygttgatygtttttaggttttyggggttyggtggtygtttgtygygygttagttygygtttygtygagttttttttgtygygtyggygtygggygygtagtagygtgtgtygtygtaaggtggtttaggygygygagaagygttttatttttgtgttggttgtggttatgggygtgttygtgttttgttggtttttttttttttttagttatagtttgtayggtatttgtygygaggtttgttaggtgttyggttygttttttaagttttttttttggatyggttattgtaatagttygtttaattyggttatttatayggtttttaattaggattttyggygattttttaagtatattttttttygayggaggagaaggggttttaggtagtgattygtattygtttgggaattttggatagtttygygttyggggttgggtagaaggggyggttyggayg

SEQ ID NO: 11067 - DNA, 2661 bp, Artificial Sequence
  Description of Artificial Sequence: Synthetic polynucleotide
gygyggttttgtttygygttttttttagttagtatttaygtgtttttatttattttatttaggttattagttttatygttygtagygggttagaagattygataaagygttttttattttgtaggattagtgttyggttttygttgttttttygttttttttttgygtagatttaaggtttgattyggttttaaattttaaataaaagttgtgggtttgtttttaagtgatggyggttggagaaaattagagttgggggyggtatagttagggtgtatttttgyggtgggtyggttyggygtatttatagtttttagttgttagtttaggygttggggtygtagggattgaatttygtatygttttygtagttygggtgygygttttatyggtyggtttgtttttygyggttyggtttatyggtggtagggayggtttygtttgttttagtttaygttygttttttttttttttygtttgtggttttgttygtttttatttaagtttttggtggtttaaygtatttttgtagagatatttattaagagatagygtgtgtattttgtttttygttttayggaagaatttattagtagygttatttagttttattygttttaaagtayggtattttttagtttaataaaaagatygaaggygaaatattgtgggtttttgttygygaattaatygtttagttatygaattttttaaattgatttatttggaataagttattttgtttttttattttttattttatatatatatatatatatatatatatatatatatatatatatattgyggatygggggtttagttaygtatatattttaaaataaaygagggatttattygggatttttagtygggyggtygggygttttygttttttttttttttttttgagttttttagggattygttaygtttttyggaattggggtagyggttygtttatttygtgttygttgttggtygggatgattttagattygtttattaaggaagatttgatgttagttaaatygttttttttttygggatgattgatttyggygaagattttttttttttgaggatygttttygtttttgaaggggattatttygttygtggygtagagtttygggtttttttygtygtygttatttttttyggagagttggggtatttyggyggttttgtaattttygtttygttgtgggagtattygygtaatagtaggaaagatagaggggtaatttaagggtgggggaggaaaggagagttggaagggttygtgtagtaggatagygggyggaagyggggygggygagygyggggtygtyggtyggtagtyggagtagttgtygyggygttygaatttyggyggtygtygygttttttygtttygyggagatygaygtaggygttygttttygaggtygaagggtattgggyggygagggttgyggtagttggygatttygggggygtttgygyggygygygttagaygaggttgtttyggyggttatttygygatttygygtygtygggatttgygygyggagaaygtyggttttggagggagtaygtttttttaaagtgtagaggagggttyggyggygygttttygyggaaattttttttattgtagttatttyggatgtygatttagtagtttgtttttygagaaaagagaggggatttgggtagaagggtttygtttgttttaaaagaaggtgtaaggattagaagataaygaaaygtttattttttgaagggtgggaaaaaaagaaaaagaaaaaggagttatttaygttggagatgttygttttagatttttttatttttttttttttygtttyggttttttttttygaggtttatttaatttgttagagaaggaggaggagtagaagatgggggtygaggaggaggggaagagaaagagaagtttgttaagaataaagtttttgtyggtaagygyggggatttygtagtggagggtattgyggagtttyggggagttatagygggggtttygggtttaaatgtttttgttyggagttygagtygatatatatatttagttygatttttttttgttttyggttygagttttttagtttggttygtyggttygtygttttgtaygttttygtyggttagttttgttaaagtaaagagttgygttttttgagttygttyggtygaggggaggggaygtttygagtttggtygygtgygaggtttygggygygttttggtttttyggttygagagygygtagttygggtttttttttygygttttgtttygtaggtgagyggttgygtttttttattgtttttttttttttygygtttygtyggygttgaaaagttatttatttgygtygtttttttttttttttttttttttygtttttagttttttttggttgttygttggaggggaggyggggggtgagggggagtyggygagaaggaggtggtgattgagggtttttttttttttttttttttttagattttgtaggaygagttttggttttggggtgtgtgagtgtggtgtgtgygygygygtttggagggaaggattaggtaatttggygagagaaggaaggatygggygttgtttataatttatygaaaggtaygttttgttygyg

SEQ ID NO: 11068 - DNA, 801 bp, Artificial Sequence
  Description of Artificial Sequence: Synthetic polynucleotide
gygaggaaaattgaygttttattttttyggattttgttygagaagttgggggattygggttyggtgtygaggtgtggttygagtttggtattatttaygtyggtygggtgatttyggttttttggggttttygygtttygttagtaggygaygttgggaggttggggtaggtttagagygaggaygggttyggattgggtagtggggatgtattagggtygggtgyggygggagayggttygggaggyggaaggtygyggatttgttygatagaagagtagatgaggggagatygaggaygttygggttyggggagtttaygaggaggttaggatygyggggtaaggaattygygggtagttattttygttaggggtagggttyggttagttaggygygagaaggttaggygaggtygattgygyggggtgaagaygttaggtygatagttgygggttttatygttagttttgaygygagtttgygttttggygayggyggagggygggtagggggygygggygttgttayggygtttgtttagaatyggtygggaaygtygygggygggttttttyggtttttygtttttttagttttgtttttaggttttygttygggttttttaagttgttagtygygttygttttygggtttttygttttttttttygygygtttttttttttagyggtygtyggatttttttagtttattttttttagttaaygygtttttyggaygttgttagtttgagygtataggtattgggyggggtttaygggggagtygtttaataatyg

SEQ ID NO: 11069 - DNA, 311 bp, Artificial Sequence
  Description of Artificial Sequence: Synthetic polynucleotide
tyggttttygtttyggtggttttaggtttygggttttgtttggyggttttgtttttaatgyggagttggyggttttgtagtaaygtttttgttagtagygtttattgagyggttttttagttgttgtatygtttttagygtttaayggaaygtttttygtaygyggagtttataagttgtttgtgtygttattttttyggttttggtatygttagtattttttaggaattttttaaattygttttayggtgtagaayggtaattgtatygagtttttgtgttaattagtattttygtaatatygttagtyg

SEQ ID NO: 11070 - DNA, 1048 bp, Artificial Sequence
  Description of Artificial Sequence: Synthetic polynucleotide
aygggagtaggtygggttgtttaygayggaagtttygattttggttggggttgtyggtygggtagygygggagagttagggttagagtyggggtygggaattttagtttygtygtttaygygggatgtagygattatygttygtygttttygggtyggtatttattttygtggaggggtagyggygttagtatttggtygyggatttyggttttgggggagttaagttygtagygttygyggtygatgygaaaygtgagyggggygtygyggtygggtttttgtatygttaygttgatgagygtygtgtagtatttttggttygygttgtttgttygtgtyggttataggttgtaggttagtagggygagygyggygagtygggtagggttygttygtttygygtagtttatygttttttyggtagtygtygttgttygyggatygggtttyggggtyggygtttagaggyggggygggygyggttygggyggyggygggagygygygygygyggtttgygyggggtygagttygagygyggtttttttggaygtygyggtttygtygttygtygtttttaygtttattgttygtttgtggggaygygtttatgggttttyggygagggyggygttttaggtygtaygygggygttttttyggggttttaggagggttgtagaagygtgttttttttattttttygggtyggttttatygaatgggaggygtttygtaaggaygyggygggggaggggaagggyggtaygggaggaagygtttygaggagggttagyggaatataaagtttttttygygyggttgtygtttgaggygygtgttygtygtygtttygttttttygttggtttagyggtaaygygtaggtttaaggygtagtttygtttygagygtatgygtgttagggtttgttygttttygttygtttgtaygagggttygggtagtygggttagtygttggtgttggttgtttttttgttaggygtgatagtygtagggygtggagttygggagatttgygaggayg

SEQ ID NO: 11071 - DNA, 301 bp, Artificial Sequence
  Description of Artificial Sequence: Synthetic polynucleotide
gygaaattygttttygtttygaagaagggttttaagaaggtygtgattaaggygtagaagaaggayggtaagaagygtaagygtagtygtaaggagagttatttygtataygtgtataaggtgttgaaataggtttatttygatatyggtattttttttaaagttatggggattatgaatttttttgttaaygatattttygagygtatygtyggygaggtttttygtttggygtattataataagygttygattattatttttagggagatttagayggtygtgygtttgttgtttttyg

SEQ ID NO: 11072 - DNA, 1395 bp, Artificial Sequence
  Description of Artificial Sequence: Synthetic polynucleotide
gygaatygatttgtatttttttgtttattaggaagyggtygtygtygtygtaattgttggygttgatygygtaygattggaaagttgtaattttatggttygaggggtaggttygggttgagtaggttttygagtygttattgttaagtatggggtattttaggaaggagtttatttttgtattgtttatttgttattgagtgatttggttttgygaagttyggygtgattgtgttaatttttttattttttttatggggtyggagaagaaaaatgatatgaatgtatagtgygtaagagggggggygggagggyggaggaygttggaggaggggtaygtgayggtgttagttaatggttgagttttttgtaaaagtttgtyggttttygtagtgatggattatygttttagtggtatttaaattttyggygtttygtygtttaggtgaygygtagtygtttttttaggtagtttaggyggyggtagttgttgyggygattgtaaaggtygatttggagtgttggagygaagaagagtaaaagttgygttttgygygygttygatttygttgttygtttygttaggttttygggaggtgggggttgggaggygtttttygttttygttttttttttatygtttaatgaaagatgaattggygagaggtgagaagggaagagggttttyggttttttyggggygggaattagtgggttagagttygtygggtggtygtaagtaygtyggtttagttygtagygygtttagtyggaaggyggggaattyggttgatatygygtttygggtttttaggttattttttttgttttgaggttgggttgggagatygtggggttgtgaggagygtatagaatygtggtggagggygaggttgggttatyggttttttaagttyggaatggagggggaagagygtagagggttggttgggaggaattygggtgggygtgaaggagaygagggtaagaaaagaaatttttttttttttaggagggttttygaaattttttttttatagtttttttygttattagtatggtaatgaggagtttttgtaattygatttggaggggyggatgagttttggaaatttagagttygtyggaaaaggtygggggyggtygggttttttttttttattttttttttttygtygtttttygttttttttttttttttatttagttttgtatygggagtttttygggatgyggagttattygatygtyggatttttaggggtaggaggygggggagagagatgaygttggyggaygtggttagygygggggtygggyggtgygttgtaggttatttgtyggygttttgagatttaggagttttygygttttygygtgggttttatagggtyg

SEQ ID NO: 11073 - DNA, 766 bp, Artificial Sequence
  Description of Artificial Sequence: Synthetic polynucleotide
tygggtttttttygttgtggttygtttgtatttttgagttggtatttgtttttygggyggttagaygttygtttggtttttttttyggtttyggtttttttttygyggygttttaatggttttygtttttygygtagggttaygattgtttttyggtgttgtttatttatgaygtygtygyggggatgttgagtttyggygggyggttggaygtttttaagtagagttygtagygtggtttgayggttygygagygtttttagaatttggataagaaggygagtttygagggtggtayggttgygggygygggtttagattygttgtataagaatagygttaggtgagagygggagtygggtyggygggtgggyggggtttyggttygtttagaaatagygtygggtgaggaaggggtttggagttttttttttggggtattgtgttgggattttgaggattggggattyggagggagggtaggygtgtttttaattygttgygtyggaayggygtttgatgagyggygggttyggataygaggggayggggtygatttgtgggyggggttttggygtygtattaaaatygygtggggyggaggtyggtagaggtygygtagygggtttagggtagggagtggttttgattygttgyggaataatatygttagttgtgggyggggtttattttgattttattatagtagtttaggtgttagtggagtttgggagggatayggtgygatygatataagayggggtyg

SEQ ID NO: 11074 - DNA, 691 bp, Artificial Sequence
  Description of Artificial Sequence: Synthetic polynucleotide
gyggtaaagaggtyggatayggaatygttygttyggtgatygaagagayggygaggaggagttygygaattygtttttgtttaggtttygtttattygaygtaatttgttygtttttttttatttttygaagggtggagtttgaggtttygtttttaagyggttttttttyggagtgtttggyggttagtagggyggggtaggaggttgggagagggaygggtgygggggtgggggagaggaagggagyggttaygtgtgaggggyggttygaggttaygtgayggagygtyggagyggagggagtyggggttgggagtttttttgagggaagaggagtggagtaggggggaygyggyggyggygttgataatggtgagtgygyggyggttagygygttygtttttygttttygtttyggagygygyggygggtyggttaatygygggtygggygtygtyggaggaggggaygggggagtagggyggggagyggggttaggtttgtygggttatttttgggtttgggaaaagttggyggygttattttttttyggtttyggygaggttygagtatttaygggyggyggygtgtttttttggttatgtyggagtttttgttygygtttttygattgtttgttggggttttggttggggattyggatttygtttttgygggggttggtygtyg

SEQ ID NO: 11075 - DNA, 1024 bp, Artificial Sequence
  Description of Artificial Sequence: Synthetic polynucleotide
tygggagggygtagygttygggtggggagttygagttagtttaggtyggttttggttttttgatttagatagygtagggygygagggatygygyggtygagttygggtygygtygtttttagtatyggggtygttagttaagagttygaggttttttygattyggatgtgatgaaaaagagtaatagagggagaagtgttttaggattgtaggagtggaagaggggaaagagaggtagagagggggaaggttttttygtaggggagtyggttggagtgagttggttggaaagagggggyggagtgygyggagttagagtygttatygttgtygtagttgtygttattgyggygtttgggttgagtyggagggaggygggaggaygygtaggggyggtygtygtygtygttaggttatyggggygaaaatgyggtygttgtyggaggttygttaatttttyggggtggaagaggaggaggaggaggaggaaggggtttggagygattayggggggatgyggaggtaggtagtggttttygggyggggaagaggaggggtttgatttttattttyggggtttttttaaattygatttttttttttagttttttttygttgggtttatttyggatttttgggatttygtygttgttaatttgygttgtaatagtttttttygtaagttttaaattaaaattttttyggggtggagtttgagggagggaagtggagggggagggaaygtttygtaggggtggtgtgtttttttttaaaaatatttttttttttaattttgtatattttttygttagaagtagttagttttttgtatttagtattttatagtttttttttygtgygttttgtygggyggygagttaggyggtagyggygyggygygggttyggyggagyggtttatgttyggygygggygaagttttygttttygggttygtggggtygtagygygtggtygaggygggyggyggttagttgggttttatagtttagggtgagtgygyg

SEQ ID NO: 11076 - DNA, 1339 bp, Artificial Sequence
  Description of Artificial Sequence: Synthetic polynucleotide
tygtttttagygtttttaggtttatttttygtagatttttttygggtygtttttttttgttttattttaggygttttttttttttygtagttatatygtggttgtattygtygttttttttttyggtygttattatttyggttttttagaattttagtttttygygttygtagtygygtttttgttttttygattttygtatttttatttggttyggttttttygtttttttttyggtttttttttttaggatatttgtgtygttttattttttttattatataygtattttttattttaattttttygtttttttgttttttttttttygtyggtttttttttttygttgttgtttygagagttygatgtgggagggaaggygygggggaggggaggtygygaagggggttgttttttttygggtttttygtgttgyggaattgtagggttttttagygttttttgtttttttygtyggyggygyggaagtyggggtttttyggaygttttygatgagggtatttatttttttgtyggggatattttgtagayggttttaatattggtaaatattatagagaattgatttygttyggtygtygtyggtttttatttttygggtttttygtttttygttttygttygttttygttygttttttyggygttttygtygygttttttygygttygygtygygygttttygtttgygtagtygttttygygttttagtaygttyggtyggygygygygttyggtatyggttttatttttatttygtttttygttggttygygattaagygyggttattgttygygaygtagttttygttttttggyggttgtygggttttagtagttgtaggttttgyggggttagyggyggygagttgggtttttgggygagggttattttyggggggtttgggtaygygggygagygattgygtaaggagygygttyggttygtagttttttygttttyggygygatttttygttttttygtttgttaagggtgggtttggggtagttttttttatatttgtaattyggtaattttttttttygttygattgatygtttgttttttttggttygtattttgtgttttgatttttygttygtattttttttaggtttttyggttgtttttttgtgttgtgtaggggaygygygattatttygygtttgtttyggtygtygttgtgtaaygtayggtttagyggattttgtatttttttagaygggggagggggyggggaggaggttgttttatygtttygtttagtaaatattagggattygtgattatttgttygttaagattygyggyg

SEQ ID NO: 11077 - DNA, 2273 bp, Artificial Sequence
  Description of Artificial Sequence: Synthetic polynucleotide
aygyggtggtattggtggttgtyggtagttgtygtttgtagagtgggtgagatygagtgtggtagatggtttggttygyggtgttggaggggattggyggagtagaagygttttggygtygggtttttgtttttttggagttggggtttggggaatggggtyggttattgtagggatagaggagagggtagggtaatgggtgygtaggggttttttttaaaggttgygggtggttaggggtgtgygggggygttgaggtgyggtygtygagagattttggtttttagggtggtygggtttggtatggattttaggggatggtgtatatatyggatyggaygggttttttttttattttyggatttttyggttgggtagyggttagggagaggggygatttaygggggygggtgtggggaygtyggattaygygttaggagttttagatgggtttagatttttatttttygtttygggtygtagtgaygttagggttyggaygttttyggaayggttttttgggggygttttagttttayggattygtagggagttttygtygtaatttgtatggggtttatttgtatgatttygtttygygygggagtygggggygtyggygattggaggagttattgttaatttttaggggaaagtgggygaggygatttttgggtygtttattttattttattttttagttygygtygtatttggggtttttttttatttaygtttygttagggyggggtygygggygtagatattygygggtataygtaygaygaygygtataygyggtygtaygyggtttttygagttttttgyggygatttygatttattttygygggtgyggggygyggattygttyggtttagtttttgttttttaggygtttttttttttygygatttgtttyggtygtattygttttygttttagtaygygaygttgttyggygygatttttgttttttyggtttagttttatygttgttttygatttaattttagttgaaygttygtagttttagttttattttyggtttagttttagygtttttagttttattttyggttttagttttagttttagygtttttaggtttagttttagttttatttttagttttaatatttttaggtttattttyggttttagttttagttattttagttttagtttyggtttagttttagttttagygttttyggtttygggtttagttttagttttagttttagttgagtattttyggtttygtttgttyggygtttttttttgtgyggygttttttygttygtattygttygattttttggaatttttygyggaygtyggggtttttggaggyggttttttttgtttttgttttygtttttttttygyggygttttygttttttatttatttttttagtttygyggggaygaggggagttggagggagttygggattyggygyggttttygtaggyggygtttttttttygttttygaygyggtygttttttttgtttgttygtttttatygtygttttygtttttgtyggggayggggatagtagattttyggygttyggttttygygtatttgtygygygtatygttttttyggtttgygyggtttygggggtttygggaagatygagygttggyggttagttyggggaggttgtgggtagtaggggtggttgygggtttttagtttttttttygtttatttyggagtttatatttgggatttttatttygggagaattttgttttttttttaygatgagtttggaggattggagtygggatttggtatttttagggttgtgattgggtgaattttgagggtatagttgttgttygtygttttaggggttttaggatggggygagtagttttgaagaggtttaagggtatttygtgaggagtttttaygttttgagagtggggygtagagtyggagtttygggttatgttttygttgtygttggygygggatattyggtagtygtttggygtttttttgttggtgygaggttttatggtgttttgtaaygtttgtttgattttgttggttatygttaygttyggtttygyggtgttgttgttttttaataattgtaggtggtygygggyggggygtygtattggttaagttttaatttygaggtttttgtatatagaggttggaggtygyggygggttygyggggttttyggtagtttttyggggatgggatgggttattttgyggatttttyggtttttggaggtyg

SEQ ID NO: 11078 - DNA, 5586 bp, Artificial Sequence
  Description of Artificial Sequence: Synthetic polynucleotide
gygtyggttgttggggttgttaggtgttaggagaygtttttttygggtttgtttyggygttygtttttatyggygtttgttttgtygtttagttataggtttygggttttttyggtagygyggagttgayggtgggygyggyggtygtttgttttttggygttggagggygtygaygtgagttatattaattatygyggtyggagttygttggatttggtygtygagggtygygtgtttaaggttttttagggttgygtttagygttttyggtgagttygtggayggyggggatggggttyggyggttttygggttttttttaagtygttttttttttttgtagggagyggtaggygggygggggygyggtttygggttttaggtaaaygttygggatttttaatatygtgaygaatttgtaygtgggygtygygtyggggttygaggtygttgagtgtttggtgtgtttygagttggygttgttggtgttgttttygtygtgttagtatygtatygtgtgtgagggtgagtggggggtttyggggtggggaggttyggttagtagggtygtagttaatygygttttttttttygtagagtgygygygtaggatgaagaagtgtattaggtgttaggtggtygttagtaagaaattgygtttaggtgggtgaggttttgygtttttaataygttttttgtttagttggtggttygygggttttygttttttatttttttttttttatattttygtttatggtttttttttaggttatatttygtttttttaaggtttatattyggttttttagtttttagtttttagttttgtttgttttagattatattyggtttatagtttygttttaaggtaatattttttttttttattatattttagtttygttggattttayggttttttttagattatattttttttatagttttattttagattatagtttatttagagtatygtttttttattatatttyggtttagtttatagtttatttgtagttttgattttagttygtatattattttatgtttgatttttayggtttattttttgttygtattygggttttatttttgtttttaaattatttatttygttagttttttttgtaggttataattygttttaggtgatatttygtttttagtttygttttttygtagttttttgtttttygtatttttttattyggttttttagtttatattygttttttatttygtagayggttttgaggtggygagygtygttttygttttyggttygtygygttagttggtggaggagttgtagagtygttatyggtagatggaggaaygtattatttgttttatttgtatygatagttatattygtttygtgttttagtgyggttayggygtatgygttttttgyggtttygygtttagygtttgttttatttgtygttagtttattygygatygtatttagattttygtgtgagtygygtygttygtygygttygagttgttttygygtgttttygttttgtgttttataaaaagaaagattttyggaygttgtttttgttgtttgtttgggggatygggygtttttggggtttttttttygggataygygggygagtttgggggygaggagggggggtttttttttgggttygtttygttygttttaggttttygggtttagattttygttyggattgyggttttygggttaggatattttttaggygygggtayggtygtttttygttttttaggttygggttygayggggyggggatttttgtgtttgttttygggtttttttygttttttygttttgggggyggtygyggggattygygttttgatttaaggggttygatattttttagggttgtggggtttygttttagtagggagttagttggggggygttttaggtagggtttgggggtygggygtaygtaggyggggtgaygagttgggggggyggggggyggtgtyggagtaaatayggyggttaggtttagtttttygygttttttaagaatygttygyggtygtygttagttgtttggygttgatttygttggtygggttgtygttattttgggttygaygtyggygyggaaaayggggagggaygagatagatataggtyggtttggttyggaattttttgtttttttgtttaattttttattttygtttygygggaygtyggtgttyggtttyggttttagtttagagtygttygygtttggaygtyggtygtttygtygaatttttgggttttygagtttttygttttygtttttaattaggatyggtttagatttttaggttyggygtttagtttygtttttygtttttttygttttttttttttttttgttggggtttagtyggggatttaggagttatatattttttattttaygygttattttttayggggtttttygtagttagggttygttttttttyggtttttygggagattttggtaagtttttttttttygtttygtaatttggtatttttygyggtttttgtttatttaygtatttttttttygtttttttttttatygttttatatttattgttaygtttttattyggttatttttttttagttttyggggatattgttaggygagygaygygttttttgyggtttagtttagttgtttgggttaggatggagatttygtttatgtggggtttaggggttttttgaggattttatttgggaaaaaagttattagattatttattgtttagtagtgggggtttggggatttttattgttatttttttttaagygggagttttggygttgtttttttygggttgtttggggtttttttygttttttttttygaggatttygtttagtaggttatgtttaggtttttgtttttggtttaygggaygygggtttttatgttttyggttggagatagtaggtagttyggttaayggaygggttagttggttttttttaggggtagttttgttttttttttygtttygttttttttttttttattatatygggttgtaattygagtygtygagttattgtttttttttyggatttttttyggaggttttgyggttygggttttygygttttgttgttttatgtagttttgagttttatagtaagtttgttatgggtygyggggttygtgttttttyggaggtttygggggtaggygtygagygtygttggtttggagtygygttggtygttttgtgtttttttttygygttggtgttgttggttyggttgggggtttyggyggtgtyggtttggagygtagygtaggtgagyggygggggggaggttaggtgtygggttgggggggtttttaygtttgtgggtttggtttatyggggggttygtaggaygtgtgyggggtgtgyggggtgtttgagggttyggatgtgygtttygaggtyggagggttggaygtttttgtgtttagttgttgggaggggtgggaggtttygttttgttgtttagtttttttttttttattgggtygygtttttagggaygtgtaatagggygtttaggttaggagattygaaattataggtagataggattygttaygttygtttttagttttgggtatttttattttygtttttttttagtttatttttygyggtagtttttggttttggggatygttatygatgttttttaygtaygtttttttttttgaagggagaygtygttgygttgggtttttyggyggttttttttattygggtttygggtttattggtttttygtagaygtygttataygttgattttagttaggttgygttgggattattttaattttatttataggtgygttttggttgggtttygggggagggggygyggtyggygttygttgagtttattttttttgtaggattttttttttttygyggaatttgttgagttygygggagaygyggygggttttagttgtygtttttygtatgtggagygaygtgtttttttttagttttygygaggtggttttygagtagtttagygattttyggataggtgggygttygttttygtttyggttyggttttgygygttyggttttttagtttygtgttttttttaggtttttattygattaattatayggattgtttggttttygygttgtattattgtttygayggttttaygggggagttggtttaygttttttttttttygtayggyggtatttatttygaygatagygagtattgggttttgggttttaygygttatagttggaagaaaggtgatygtttaggttggttttttggaggttttttttttgtagtatagtgggttgtygyggtygggttttggggtagayggtaggagggatttttyggggtggtggttgttattggagtttagtaggtaaggaggggagttygtgggagtttttatttyggtagttttgaatttttttttttatttttttgygtttttggagygggagttggagttgtatttttgggggtygagtttatygtttgggtttagaatatttttattttttygtggttgyggtygagggyggtttygyggttgygttttagtagatatatygggtttyggggagttggtttaygggyggyggggttgggttyggggtttttaggygttgattttyggggttygtaggygtgtggtttayggatttggtgtaygtggyggtttaygagatyggttaygygttgggtttgatgtatttataatayggtygggygtttatgtatttgaaygttaygttgygyggttggaaggygttgttttaggaygagttgtgggggttgtatyggttttayggtgagtttttttgtygggygggagggyggggatygggyggttttgagttaggtygtgttttttaygttttygataggatgtttygataggttgttygtgtgygygttttgggygyggaggggtttttgygaygttygtyggyggtttatgaagaggttttgttttagtagttgygatttttgttayggtgatgtttayggggtygggatagggttgygtgggagttgggttttggttatggtyggggttgagggggtattgayggggtttttttttttattyggagtagaattttttttttttayggtggttattattttatygttttttaggattaaaattaggttggtgttygagggtaggaaygtgatttttygttgyggttagaagattttttataagaaagggaaagtgtagtgagtgagygtttygggyggttttyggggtgggtagttygygggyggttttggggtaggggtgyggggtaggtagyggggggggttgtgtttgtaggagaygtttygtttttttgtagttggtataaggattaggagtttttggagtttttttatttyggttatttggttttgggygaggygtatttgagtattatygttaaygtygttaatgagggtatttatatttgygtggtgygtygttagtagygygtgttgattatttatttttggygagttygtgtgyggggttgagttyg

SEQ ID NO: 11079 - DNA, 1264 bp, Artificial Sequence
  Description of Artificial Sequence: Synthetic polynucleotide
gygyggttygggygtagtttyggygtagttttygygtygagyggtttygygtttygtattagtttttgttyggtttygggtgaygtygtatttttygattggattaygyggtttggggggyggggtttggttyggtgagtttatygtygygtttygttattggttygggyggygtattygggtagtggyggggagatygyggtattyggagtttygygagtygttttagttgyggygagtggagttgagygggygyggggtygggttgggtygggtygggyggggtygggyggggygygggagttagtgagyggyggttyggygtaagtttgaygagtaggagtygagtttagtaggttygggtaggtgygyggyggygyggggttaggyggagggygygtgyggtygagggyggyggttggygggggygygygyggggygggggyggggtyggggygtggggataygygtgttygygggtygggggygtggtgygyggttaygygtgtttttggygygagtgtgyggggttaggtygggagggygtgygyggatygggygtgtttaygygyggtagggaggggttaygagggtgygygygtttttggygygagtgggaagtgtggggattyggygggttyggtgtgaggggygtgtttttggggygagagtggggagtgagtgtgaggagtaagggtgaggggttgtagggaggggtgygtttggtygaggagtgggtgggagataygygtgtttatgtygygagggtgtgtygaygttygagtttgygtggggttyggggtygtgtgtttggagtggtygagggygtgaggggygygygtgtttgtgygaggggygtgtgyggygggtgtgagttaygygtgtttgggtgygygygygggtyggatgagtttttggagtggtgygaggaygygygygtgtgtttgtgttggagygagggyggggaygagygtgtygggygygygygggyggggttggggyggygtyggggygygygggggttyggttyggtyggyggygagtgtgttggggygttyggtttttttttaataygggtttttgggatttagtgtygtttttttttygyggyggggttygyggagttttyggtttttttgggtagataggtgygaggygaggtgygggtatagttttgygttttttagygggtgygggatygggygaygggggattgtttttaattatagattaggggagyggagggaygttygatttattygyg

SEQ ID NO: 11080 - DNA, 716 bp, Artificial Sequence
  Description of Artificial Sequence: Synthetic polynucleotide
tygttttygyggggygggaatttygygtttttttttttygagttttattttttatggtaaagyggygtggggyggyggggyggagggagtygagggggyggggagggyggaygggyggaggggaygggaggtttagyggtttygggtttygttggttygggygtyggatyggagtygtyggggygygggyggtttaggtaagygggtygggtgggtgggggtygygttttttygtttttgttttyggtgtatataggtgatagygtyggtagtgttyggtyggagtttgttyggtygttagtygggattttyggygyggygtttttggaggggtttgygggtggggggtgyggtttttaygttttttgygttttagttttttggttttttttttyggagtyggggagtyggtaggttyggggygagggtttagtgaggtyggyggagggtygagttttagttygggagygggagtyggggattyggygygtagggyggaagttttygtataaaaggtyggagtttygtatatggatygaattaaagtttyggyggygtttagyggtgatttyggyggtygttttgttyggttgtttgyggagggtttygygttttyggagttygggggygttttaggtttttttttttagttagggttaggtaaggggagggaygggtttyggggttgtttttttttgggttttaygygttygtyg

SEQ ID NO: 11081 - DNA, 619 bp, Artificial Sequence
  Description of Artificial Sequence: Synthetic polynucleotide
tygttygggattyggggggaggygygttgggtggttyggtagtygggggygggyggtagtttgtaggygtaattggtatgtaygtygttgtagttgagatygtttaataaagtattatatattttatygtttttatattttattattttaygyggagtttgtgagagggttttaatgggagttagttgtgtttttattttttgttgtyggtygggaygggtttttttgyggattttttgaaatgaaataatgtgatgtaygtygygataagggtyggtttgtaatgaggtttaggtygtygggyggttgttattgttttaggtgtygygtatttgggttgygaggataaggaggaggagggggyggygtyggaggatygggggggagggggaagtygygaggggtagggggtgggagaaggyggagggaggaggtagggggtagggggygggyggaagaggggaggaaggagggggyggygggtygyggtaggttaggygggagaagtyggagatagagagaggayggggatagtggyggtttgtagagttttaggaattygggtttaaattttgttygttagygtgagagagygtttgttygtttaggyggtttatyg

SEQ ID NO: 11082 - DNA, 293 bp, Artificial Sequence
  Description of Artificial Sequence: Synthetic polynucleotide
gyggtttyggtaggggttgttgyggygatttaggttgttgyggttttagttttattagttgttgttgttttttaaggagaygtygtygatagyggagtagtggttgttgttgttgygggggyggtagttagaggttttagygttttaataatyggagtttaggatgttgtttyggttgttgagaggttygtaatttttagygttgygttagagaaattygtttagtttagagygggttygtttygttgyggtttttaygyggggttgggtttyggagtttgtttygtaaagyg

SEQ ID NO: 11083 - DNA, 2748 bp, Artificial Sequence
  Description of Artificial Sequence: Synthetic polynucleotide
ayggtagggggttttygtgtttttygagaatttaagaattygtttygtttttaygyggaaagttgggagaaaaattgttttttttttatttttttttattttttatttattygtttttggagtttygttygtagatatttttttttttygagttagaaatagatatattattttttttttattttttttttygtgygtatattygtttttttttttttgtttgtttttygtttttttttttttttttttttttgttyggagttgtagtttgtagtttygattygggttggttggttggttgagtgyggtyggggygttgttyggtagtgyggtgtttaygggattgataggtaggtaggtygygggttgggattyggatattaaagtaaaagtatygttgggygtyggaggagtygyggggtttttattttttttttgattgatttttaaattttaatttgtatttttttygtygtttygttttttttttttygatttygttttatygtttttyggtttttttgtttttttttttttttyggttttttttttygygttttttttttttgygttttyggtttgttttttttttttttttttygtttttttttttttttttttttttttttttyggtttttttygttttttttttttttttttttttttttygttttttttttttgygttttygttttttgtttttttttttygtgtttgtagaygygyggatygtttatgygtttttygygggtagaatgttgggtagtagygttaagagygtgtagttygaggtggagttgagtagyggyggyggygaygagggygyggaygaatygyggggygtyggtaggaaggyggtagyggyggayggtagaggtatgttgtttaagygygttaaggygttyggyggyggyggyggtatggttaaggttagygyggttgagttgaaggtttttaagttyggtagygtggatagtygtgttttyggygggtygttygtttttaatttgygtaagtagaagttatttattaatttttttttttttayggatttygagaaaaagttgtagttttatgagttygaatggagygaygatatggttaaggygtttaaaggtttaggtaaggtggggtttaagggtygtgaagtttygttgatgtttaagaygttgtttaagtyggagtattygtttttttaggttaagggtagttyggygggyggygttaagatttttttggtttygttygygtttaatttgggaaagtygagtyggatttttygaggattttatgyggaggttaagtygtttagtaaggygtttgaagyggtygtgagygaagatggtaaatyggaygaygagttgttttttagtaaggttaaggygtaaaagagttttgggtttgttttttttgttaagggttaggaggagygygttttttttaaggtggatttygagttggtggtgatygtgttgggagatttggagtagttgttttttagttagatgttgggtaagttttgtygtttygtttygtttygtttttggtttttttttaattagttgttggggaaggtgtggggaaagygaagttttttttttttgygttttttyggagggtttttttgtttaygattaggttgtgatgggtattgygtttagatgtgttgagttggtttatttttagatgygtatggtttaagtgtatttttttaaagatattataggygggaattygggttygattttggtttgttygaggtgaggttggataatgggatggggggtgagggggttataggtttttagaaatagagttagaattttaatatggtaaaatttgggattggtggaaattttygttgtggtgtggtttgygtttgataggagtatttygtattgtaaggggagygtttagygagagttyggatttagaggatagatgtgggagagtagatgtgagggttgattggtttyggaatatagttgaggttttattttttttgtggatttygagtgggagygtaagtyggattttttygyggtgtgaggattttggttaaaagaagygtttagggtygggggygggygggttgttagttgtgygtatttgggygtatgttygatattttagtttyggttttggttttaatttttatattygtaggttttttagggygtgtygaaagttttgggygttagygtygagatttttgtttgatygggaagtttttgttttgtggttaatggaagtygagtaggygggaagggaggaataaagtttgttygagtggaggaagygygtagagttgttttattgtttttygtgtttgaagagtttatgtaaaaaaattygaagygggtttyggaattgtttttttttttttyggagagtttttgtttttagagaggaatagatttgggatgtgtyggaygttaggyggttatgtttygggaattggtaygggtttttttggggttayggaataaggayggtggggtttggtgtttaggygagttgttttggttgygyggatttgttgyggtggttgggttgtgggtttttyggygtygagggattygagttttttgggtattyggtaggttgttygttygttgggggttgggaaggggygtgttaatgygygtgtgaaagggyggggtygagtgaygggtttggygggtggggaatatgtaagagttygtygggyggttttggagaatgygaagtyggaggagatyggttyg

SEQ ID NO: 11084 - DNA, 433 bp, Artificial Sequence
  Description of Artificial Sequence: Synthetic polynucleotide
tygtttyggygtttttatygtygtygtygtygtttaatagagtttttggggyggtttttatygayggtgtagttygtygggatygggaggaagtagttgyggttatygygtygtgygttygygttyggtygttaggtgttttagtagttygatygtygagatgtttagttygtyggggtttygggygttatggttttgygtygygttgtgygtttttyggagggtyggyggygttttttagttyggttyggggtttatygtttgttyggttttttgttattgttaggaggayggtattatgttgtttgtygattgttttgagttygggttgttygtygtttygggggatttggattttttgayggtttatttgtgagtattgttygtttgttttygtttggttttgygggttgttggttagygtttagtttyg

SEQ ID NO: 11085 - DNA, 1376 bp, Artificial Sequence
  Description of Artificial Sequence: Synthetic polynucleotide
tyggtatyggggttgtatttttgggtagaygttgtatgtttgtttttaggygyggttttgttgttatttttttgggggttyggagygygatagtagtttggggaygtttttygygtttagtayggtgtatttgggttttgaggttttggtygaaaygygttaagttgggggtaggtgtagygattttatatttttyggttgygygttttggyggtaggaggyggggtygggggyggggygtgagttggtyggggyggggtttatggaggggygggatygyggygttttataagtattgyggagygaggygygygttyggttagagagygagygygtaayggyggygayggyggygattttatygygtattttgttaggttttyggygtttagygttttaygygttttygygttttygygttttygygttttttttttygygttttygtttttyggttygttaggtttttttgtyggttattygttaggtttygygtyggttygttygtygtttaggatyggttygygtttygtaggtygttygtygttygygtygttatgggagtggagggttgtattaagtgtattaagtatttgtttttygtttttaatttygttttttgggtaagggttgygtygggggtyggggygggagggggtaggtatatattttaygttgggtaggtttygyggtagygtgttaggtttygygggygtagygygggtygygaagttgtggggttatttgtgggttttaggagyggggtggggggtygttyggggttatygygtttttygatattggggttgagggttgygagtygagtttyggggtttttgtgttygggggtttatttttgyggtygggtyggggtttttgggggtygtygggtagttttygttgtggtggtgatgggtgyggtggtygygggtygggattygagtattyggtygttttttagttaaggaggggtttgygygggtttttggtygyggatttyggattgttgtttygyggggaygaggggggggttygygggygggatttttggygtttygtttttatgagtttattaagagtygtygtttttggatggtggggygggggygtatattttgtyggaggttgggggygattygttttattttttttttagtttagtttattttttaatttgyggttattattygagatttttttgggggtygygtttaaaaggagygtagattttygtygggatggtttagaagttggggtgygygtattttggtygtttttgtttgggagtygatttttttttttttatttagataygttttagyggaggtttttttttagaagggttttggaggtttygtaggagtggggatttygyg

SEQ ID NO: 11086 - DNA, 3393 bp, Artificial Sequence
  Description of Artificial Sequence: Synthetic polynucleotide
gygggtgtatagggagygttaggattttagygttttgtyggattagatttataygttygaggtgatgtttattattaggtatatgaagtatttgagtatgaagayggygtagtygggtttgygtgtttggtygggttgtaggtttygtaggtaygggtagttgtgygtggttttttagygygggyggttgtgttgttygtagaagaggtaggygattattatygyggygggtayggtgtagagtayggtgaataggtttaggyggattattagtttttttagtttgtgygttttggtggggtygttttgttgtttgatgatygagyggatgyggaagagggataygaagtyggttagtaggaatatggtgtygatgaagaggtagatgattagyggygttagtaygaagtygygtaggttgtttaggttttggttgtttaygtagtagatgttygttatygggtygtygtttatygagttgagygttagtatygygatggatttgaygttgggtataagttaygyggttaggtggaagtattgygagtagtyggygatggtttygttgttttattttatatyggtygttaggaattatgtgagygataagattatttattagatggagttggttatgtygaagaagtagattagtaagaagattayggtgtatagygyggggtyggtggtttygtagygtaygtgttgttttatygygtttagtttttygtattygtygygttygttygggtygttygygttygygttygtygygttygygttygtygtygygtygttygygtttttagygtttttygygttyggygygttatygttgtaygttattttttygtggttygttattaggygtattaggtagtttatygataygaagaggtagtaggtygagaggaagataatgggtygtttygggtatttgaagygttttatgtygataaggaaggtggagayggtggygaaggtggataygaagtagagtatygattataggtygatttagaagayggtgaaggygygttygttttggttgaaaaaggggttgtggtagggtagygygtagttagygatttggtttgttttgaygyggttgtagagygggtggygttygttggataygtttattataggygygyggtattggtattygggttygtagggagtygygtygtygttagggggtygygttttttygttatygtygtygtygygagttgggggygtygtygygttttygtygttatygtttttgtygtygtygtggtgygggggtttggttttyggygggyggtygtggtygttgttygaaggyggttgttygtygggyggyggyggyggtaggyggygyggygggttgggygyggyggtggttaggtyggtgyggttgtagtttatgtatagygtgttagggttgttttgttygggtagtyggtygtagygtatgyggtygggttaggygaagtygtattggygtatgagyggygygtagtyggttttggygygttygtatatygagyggtagggyggtagyggttttttgtagttttttaggtagatgggygtgtatatgttgtataggaagaatttgagatygggygagtattggatttttattagyggttagaattggtgtatttttaggttygtttygttttgygtgtygtggttgaattgattgggtatgtaggtgtagttgtagtygatgtttttatatagyggtayggtgattttttggtatgttagttttttggtygaggyggtygtagygtygttagagygttgtagtagygttaaggyggttagtagygaggttatttttaataggtaattttattttatgttgtgygtttyggttyggtgttttygttttttaggyggygygtagaggggtgtyggggggggggtttaygagagagtygtagaygggtatagygggtgatttggggttttttttatgtttygttygggaggggggtttgtygataatttaattttttttaggggygygttygtagyggygyggttygtagtttgggtagggttttttygtattttttttygtygtttygggggtttgaaggyggttgtaggygygygttatagttygtaggttygttttgttggtttygggtygygtttagttttygyggygtagagyggtygggtttyggtttatygtttygygttygttygtttttttttygygygttygattattttttttygtygygtygggyggyggtgatttygtyggatagagagggyggaggygtygtaagttttttttggggtygyggtgygtagttaagatggttgggtygggtygtttgtygygtygggttagttttggyggttattattyggttttygggggtttatgttygtttttaaggttaagtygtygtygtygtygtyggagttggggattygtttyggtttaggtygtygtttttttttttyggygttygtttttygttygttygtygtygggatagayggattttygtygtttggaaaagttagygtygygtttyggtygtagtygggygaggtgtatatagttttttttttgttggatatttaggagtaaatttagatyggaaggyggagyggatatttgagtggygyggttygygtttagtygtygtttttttttyggygggagtagygtttttagtttaatttttyggttttagtttygttygygtygygttgtyggtttatgaatatttatatagygyggattyggttttygtttttagtttygygagttaatygtygggyggtagggyggagtttaygygtttttagggtttagttttttttaaggtagttttygagtgttygtattgttgtgygygttttttgyggatggagagttttggtaattttgggattgatygtagagatagagtgttggttatggttgtttttatggygttgagtgygtyggaggttttggtttttttatttygagtttgtttttggggatagggayggggtttggtgtagygygygttttttyggygygttttaaattagttaagtttttgttgttatttttygtaaatgtgggtgatttgtaggyggttggggtttygtgtttttyggggyggtaggaaggtttygtagtaggygagygtyggggaggtttgtyggggttyggygttgtagaagattygggaaagggtgttttttttggggtttttagaaygatggtttttgagatttggagatgtggggggtgtggagttattttaaattggggttggattygggayggttygggtgagatgtttyggagtttagttttgggygygygaggggygygggggataaatgttygttagagatttttttttygttttygttgyg

SEQ ID NO: 11087 - DNA, 1381 bp, Artificial Sequence
  Description of Artificial Sequence: Synthetic polynucleotide
tygyggtagygttagttgtatttttttttaaaaatyggaggaaggagtttgggggttaggtyggggyggtttgtaggtgtgaatatttyggaagtttttggygttttggtttttaagagtatatttgyggttgtttaygggttttaygttttgygatagttatttygtggtttygggggttttaagggyggtttttygtatyggggttttaggtagyggaatttttttttagggtttatttataaagygtggtgtygtagagttttttayggaggggttttagtttggagttygggtatygtttatttttaattygtygttagtttyggattttttygygtttgtttygtattayggagtygggtttttagagtagtaaggttattaggtggyggtgttggygtagtaggyggagygtygggtgygyggggtygygtttttggttttygaaggtgatgaagatgggtttgygggtgagttttagtagtyggtataggttttttttgyggggygggatygttaggggggtgggtgttaygttggggtttatttaatttygygygggatttatyggaagttgtggttgtattaggttyggtttaggaaggygttygaaagtattaygatgaggygtyggtagyggtttaggtttattaagaggtyggyggagggttttgygggagggygggygtyggyggygtaggggygggggygggggagggyggggtyggaggtttaggggyggtgtyggaygtagagttttaagggaggggyggggtttgyggggtgggygggtttttgaggyggggtttygggtgggyggggatgggggyggagttygatggtgggggtggggtttygggtgggayggagtatggggyggggyggggygggtttttygggtgggyggggtayggggtggggttygggatattagygygyggtaggaggtygyggtygtttaggaagagtttgtagtttygaygtygttttagttgyggttttaggatgaagtttaygaatttgyggttttyggggtagtygttgtaggagaygtaggygtygtagagtttttygtttgyggayggyggttagttatttygatggttttygaggttttatattagttttyggggtttttaatatttttaattattttttaygtgtataggggtagattygtttyggattttaattttagtygggtygtatagagtattygggggttaattttttttygtygtaygtttttaaagtygagtttagtagygtatttttagggaggtygtggygattttttttygygtttaygygggttttaygtatygtttatttttatttttttataygygttttggtattagagtagtaygttgagayg

SEQ ID NO: 11088 - DNA, 493 bp, Artificial Sequence
  Description of Artificial Sequence: Synthetic polynucleotide
tyggattygggggaaatggggtattaayggttgggttttaggagatattyggaggggttygygggttyggttyggttttttygttggggggttattagtyggtyggtagygagatatttagaggttygtttttttatygygttgttatagtaayggtttggtyggttgygtttygggtygttygttttatttygygggttygttttgagttagtgattttagggattatttatygyggtyggyggattggygggttttygataggtgygtatattyggygtaggttgtygttgagttyggaattttgtatygggagaaattttttagttygtagagtaatygtagggtagtggaygggggtygygygaggataaatagyggyggygggtgtaaagttttttttttaagtygyggggttggtygggaggtgtyggttgtataayggygtttaygtgatttaggtgtagttttaggygygtttaagggtagttyg

SEQ ID NO: 11089 - DNA, 922 bp, Artificial Sequence
  Description of Artificial Sequence: Synthetic polynucleotide
tygygggygttttgtagggatggagattgagagaggttagggattyggtttttttgggaaaaygygygggygttttagtttttygttttgyggtattttatttgttttygaggattatygttaagaagaggtttygtygtgttattgatattttatttygttttttttygygaggtgttttygagttttygaggaygyggaaygtyggggtttttygtygggtaagtattagtatttagatttygtaygtagttttgtatttttaygttttttagggaaygtyggttygttygttttygggatttttygttttttaagttaaggttttttaagtttagtgttygygygttattttttttttygattttgyggygggatttttattttygtattttttygyggggttggttaagtttttagattttttgygttgtagtyggttyggaaagttatttttaggttattttttygygygygygyggyggyggttayggtggyggyggttgygattygaaygggtttttttatgtatygygtagggtagaggagggagyggygtttygtaygtyggggttggggygttgggtagggygggygggygtggggtttygggttttttygtatttagtygygygagtygggttttygggtttaggggaggggagttgaggggyggagttatyggggygygttttygyggttgygttttttttygtyggggagygygggtaygtaattyggagggtgttgggtyggttyggagtaygygagtagygggaggagggatyggggaatgattgayggaggygggtygtagaggtygttgtgtttygtyggttygtattyggtyggagtgtgygygygtagtttgttagattagyggygggggtaygggtygtattaagtgayggaggggggtayg

SEQ ID NO: 11090 - DNA, 719 bp, Artificial Sequence
  Description of Artificial Sequence: Synthetic polynucleotide
tygtttttttggtatttayggygtttttgtttgtttttgttygggtttyggaggygygaatattattttaagtttgygatygygyggtattattttygttttttttttttttttatttygttttttttatttttttygggagtttttgggagtygggtygtygtgtgygtaagygtgtttagtttttttttygtttttaattygggttygggttttygttttttttgtaggyggattygttygtttttaggtyggattygygttygggatagggattyggtygagtygagtygtygygttagygttgygtygtyggtyggtgygtttagyggatyggagttgygygyggaatygtgttgtttygtttygttttattygtgagggtgagtaygyggyggyggtgygygggggtttgyggggyggggyggggyggggagtygyggggttttyggtygtttgattttagtyggygtygygtttttyggagggggtygggttttgtaygtgggygtagygygggtyggggtggggttgttatagttttgyggagttgtttttyggggtttttttttttggattagattttygygggaagtyggatttttttygtttttttggagtgagtaagygggatagttttgyggaaagttttygtttttaattttttagttttgygttyggattgaagyggyggtttttatttttagtattttygagyg

SEQ ID NO: 11091 - DNA, 958 bp, Artificial Sequence
  Description of Artificial Sequence: Synthetic polynucleotide
tygygttgttagtatttygtatagttygttygaaatattagggaaggggttygtaggtgtgggggtggggtggygaggttaggtagtttggygygagggagagagtygaggtttgggttaggaaggtttttgggtgtygtgtgggygtagagtttaggagagygtattgttaggttyggattttttygtttttatttygggaagaggttygttygtygtagggggaaggygggattatagtatttyggaggagyggtyggttygggtatgygggyggyggggyggggagggaggttttyggaatttygagagagtattygtgtttygygggtttygtgtttygttttygggtttttttttttttaaygtaggggatttagttyggggtagtgtygggtattggygttggygtttygtttagttttgygattttttttygtttygttttttttygtttygtttygttttttttygtttygttttygggtygtttygtttygtaggttygttattttygggtaggtttygttttttgttttygttggyggyggyggyggyggyggtgtyggagygygagtagagyggagatttttaggttttgygggygyggtgagtgyggttygggyggygggyggygaggygggtttygagagygtgyggagtygygyggttttgagtyggygtygggygggttgggtatttttaggtygagattygagaagggggagyggtygggggygtttaygggaggtagtgtgggtagggyggyggtgggaygagaggaygaggaatagagtaggygtygtgygggaagygggtygggaaggggagggtgggtgyggggttygggtatygagygaagtggggttttttaggggatggtttygaggaagatygttttagaaagggagtaattyggggtyggtaagggttttygattgtgtgatttygtgtatyg

SEQ ID NO: 11092 - DNA, 3843 bp, Artificial Sequence
  Description of Artificial Sequence: Synthetic polynucleotide
tygtaattttgaygagaagggttttttygttgaaagtttaattgtagagygttyggagygygttgtgagttygtaggaaygyggtygggtyggggaygggagaaaggygyggtygggattttgtattgtgtygygyggygtttgyggttggaatttggtttggaaygyggttttttyggttttagtttttygtttaggtttygtttattyggtygtttygttggttygtatygttgtttyggttatygaggagtttaaagttggyggygtttygyggatttyggyggagagygygagggagtygyggtygatttttgtattaygaagataattggaggtyggygggggaggygggttaygaggggttggggygagggagttgggatgygygggttyggttygtygggaaataggttgtygyggagtttygttttttttttttttgyggttttygtygygatttgattttygttttgttyggggagttaatttagtygttttyggggygttttttttttttttggatttttayggttggattagagtttttttggtagtygggttaaaggtttttttagtaaggttaaggygyggtyggttggtatttggggatttttttttagtygagtattggttttttaatygtattgttaaggattatggtagyggtaggaaattygaagggttttataggtttgygggagggaggatttattttatagtaaggaatagatttagatagatyggggattttagtgggaggggaygagaggttttaggaygttggaatgtggtaaaaataaaatattttttatttatgtatattattattttttgattgygggttggggggaagggagtttagggttaatgtgttttagattttagygttttttayggttgtgttagggttggggtggtttatttttttatagaygaaaattaagatttaaaagtatatttttattgtggtttttttattaaagtttattaaygtgatatataggttgyggygttggagggaagyggygaaayggggagaataaaygtaatagaagtaaattgttgtttgtagaggygagaggygaaggaayggaagttatattygattttagttttatttygtttttattagygtygggttagygtaggaaattaggaataggtgtaggtaagggtggtagttyggtagagttagygttttattttttttaatttttygttagygtgggtttggatggttgggttgtttgggtatttttaagggggattaggtatygygggtaggtttttaaataygtgaagggtatagggtttgaaagataaggaggggygtttaggaagggyggaaaagaggggttttggggttttttaggatattaagttagtttttgaaaayggygttttttggaaggttttttaatattttygagggaagatttggagttttgaagatttaatgaaattttagttttgattgattttttttttgygattaatttyggatgtttttatttagtttttgtttyggtaatyggttttttggggatagtagtattagtattygaygtttatygtataagtgggygtygtggtgygaggygtattttagttatttaggtyggggtgggggygtttyggtatttatattttttaagtaggtaaatttttaggtttgtttttygagaatygggagttygtattatagtttygggtaattatygaggtagtttatgtaattgttygygatgtygtttagtagatttttttttttattyggttttagagtttagtatatgggtatttttttttttttattttttatttyggygattggaatttygagtttgttttattatygttttttataaagtagyggggtgatttygtgtgttataaatattaagttagtatgtaggtttaggtaaaattttggttgtttttttgygttttttttattgygtygatggtttatagataattgtatttttataaattttttttttayggttagggggtgggagggagttagagatygggtgggggtttggygyggtattgttgagggttttgtatttaattgagtagtaatatatttatttatatggaygygggtgtataaatygttttaatattttgttttgaaagyggagttaatttttaaagttaaggattaygtagttgaatttttagtattttttaatttygtttaggygggggtaggtagagaaggggygggtagygggtagttaattygttygattttttygttaagaaggatttattaggtgaatttttygttttttatttaagtagttggttgtgtatttttyggttgygtgtgtgtgtttatatatatatatatatatatatatatatgtygttttattattttttagtttgtttttttaatgtaaygatygtatttaaaaatggtaattaaaatgattgaggagttyggtgattatattttaatttagagtatatttttygaagttgggggtgagagtagttatatagttatatttatattygggagttttttaagygtttatttggyggttgtagttttagttggtttttagaygaatattaatatygyggtygggygttyggtgaggagaggygggygtttygygggttgtagagggygaggagttggggtygtatttttaggatttgagttttaattatygttygtgyggggttgttgtagtyggtatttgtttygtagggtaggttgtagtygttgaagttyggygtygtttygygggtttttttagygttygaygggggtttggggygagttagtttgtagaggggttgtaggygatygggtyggggyggggaaygggattygggagaggtagaygaatttggggygygtygttttttttttattygttttttatttttttgtttttttttaatttttgtttttaggttttagttygyggygggtttygggggttgyggyggttttaggttttagaatagtttgttttttyggttattygygttttagtttttttttttttgggttaggggagtaagtaaatatttttyggagttttyggtagtygygtgagttattygaattttgttygggttagtagtgtagagggygatggagttggygaggygtygtygyggtttttaaggygttttttygtagagyggattaygtygttttatygtggttgtaggttgttatygtyggggaagyggygaggayggyggtagggaggtaaggygtygygtyggtggtttttttttttttyggyggygyggtttttttgtttygygagtygtagyggggygtttaggaaggagtaggttygggttttgygtttagttttagygagattaataatagttttygyggggagyggagttttagygagtttttagtygygygygtaygatyggttttygttttyggtygttttyggtyggygtttttgttagtattgttgttttatatgaaatagttgtaatttygaggtttttggggggttggggygggtgtgtgygygygygtgtgtgagtgtgtgtgtgtgtgtgtgtgtttaatagtttttttttttttttttttttttttgtttgttygtttgtttgttttygttttttattttygtttttttatatatagaaagagagggygagygagagagagatatatatatataygtataygtataygtaggttatatgaatgggaggyggtagttaattttaygaggtyggygagtygygyggygtattggygttgggagtagggtygtatttyggygygggggggygttaygtaggtgatgggygttttttygggggttaygygyg

SEQ ID NO: 11093 - DNA, 384 bp, Artificial Sequence
  Description of Artificial Sequence: Synthetic polynucleotide
tyggaagtyggggggygggtttttatagttattgttygttattagttygttattgtgtttatatagggtgatttgatttygaggyggtggaggagggaataattttagagagtatattttgtyggttygtaggaygtttgtagtyggtaaatttttggtyggaayggtatagatygtattttygtaattyggttttygggttagattygtatgyggaygggtatygtaagggataaayggygaggyggaatttaayggaagtgaagaaaagattaaygggaaagaaggaygagtaygyggtttygggatagatttttaaagtttttttttgygttttttggyggtyggagggggagtagygyggataygtttttyggttaatyg

SEQ ID NO: 11094 - DNA, 1432 bp, Artificial Sequence
  Description of Artificial Sequence: Synthetic polynucleotide
aygttttgygtttttagtyggggtttttttattyggygtyggygygtagtatgtygggagttgtagttttygygaggtaagtttygtttygtttttgtttgggggaggaggttggagagtygttttgtyggtttttgaattttgtygygaaaagygygygtggyggttttyggtttygtttttygtaggaygyggtgtygygttattttggtaatygttttttagtygtygttgattgggttgggtygyggggggygggygggggaygagaygygggggttgttgtyggygttygygtttgttagtygggttagagyggagtagygggtaggattgtttggtyggttgtttygyggagaggttgygygygtyggtygggggaggyggatagtygggttyggygtttgtggggygyggygygyggtattygggtttgagattaggygaggygtyggygygygttagayggygygaggttgyggtttygggagttttygygygtygttyggggttatgggygygtgagagtttagygygygyggtttttgttgyggtttgygagttygtatattyggtgtatagtttttygggtygttttygtgttygttttgygttattgggatyggttgttttttagygtygaggttttygaggttgtattygagtttgygtygttygttgtygtygtygtygtygttgtygtygtygttgttygtyggttttttttttttttatattyggggtttagagtaggaggaggaggggtyggtgtattttygtygttgttttttgtaatttgtaggggtyggtgtatgttyggygaggagtyggggtygttgygggtgygtgtaattttygaaggagataatttttttatttyggggygaattygggggttgtaagtygygggygggygggygagygagaggaagtaataaagataggttgtagttggggttggygaaaggggtygyggtygtygggtttttagygygggyggagagggygttttgggagyggygygggtygagttgtagttttgagyggggtttygaggggaggygtagygtygttygtyggaygtggygattaygggtttyggygaagatgygtygtttgagygttygygyggttttygttyggggygggygtgatttttgttgaayggagattttttttttttttygatttyggayggygtaggtyggygttaggatagtttttatygatagygtttttttttattyggagagaggtatygatttttaaggagggtttygttaggtagtttttgttatttttgtatggttgygattygtygagyggagygtygtggtagttgagatttggtgtttttygayggtttggttgattyggtgagttgtgyggggyggggttttgygttggagttgggggtattttttggygttyg

SEQ ID NO: 11095 - DNA, 325 bp, Artificial Sequence
  Description of Artificial Sequence: Synthetic polynucleotide
aygttagygaaggtygtttyggygtattttagataatgagygtagtgtgtaggagygaggggttggtagaggttaggaagtttttggggttaggygyggttttttatttttaygttagataaagagygyggggtttggggagttggyggttttttygttatttggggygtttggggggttttggggygggggaggygggggttttgtttaatttygttattgttattatyggttaggtygyggtttggtaattygtgaataggaggtagggttgtagggygtgagggatgatgataaggaagtyggaggagtagyggyggtagyg

SEQ ID NO: 11096 - DNA, 1242 bp, Artificial Sequence
  Description of Artificial Sequence: Synthetic polynucleotide
tyggttttggtttygtttygtaygygttggtgttatagttgtggtgtagaygttttttygttgygagggtgyggtygtttyggggygagtgtttttyggtttgtaggaggygaattygggttttttygggaggygttygtgggaaygygtatttgygagtttttgtyggttgaggagtygaggtttgygatttttgtygatttgagtttaggygtagtagygtagatttggtygtygtattttttttggttgggatgygggtttaygygggaaaggttgaaaggtggggaatatttyggyggaaaggaattttttttttttgttttgaaggaaagttttttaatatagttatgtttttggtggttttyggttttttatttttaagtttttagttagttttatatttattygttttagtagtygyggagtgggggtttttaaagaatttagttgtagagtaagttyggttgaygtagtgtgygttgggggyggggttttggaygggggyggagttayggygagagtygyggtgagggyggggttygggtgggyggtgttttgagyggggtttttagtgggyggggttttggggtggyggtygttgtygggttaygggagagygyggagttttgygttgggaggtgtayggtgtgtaygttggattggatttttatgtaatttygygttttgygttttaattaggattgtttygygygtttttgagtttygggtttyggttyggatttgtagttttttaggtggttgggaaggtaggtgygtygttgttttyggygygyggygtttygygaggtttttagttttygttttggtggattttygttgggtgggagtygggagtggaggyggtygttttagggagggaggagygtaggygggggttgtttaygggyggagtattgygyggygaagggaattttygaaggggttgatygggtttyggggtygtgataggyggygaggyggtgggaggggagygtgtgaatttaygtygggttttygygggygaygygagygaygygatttggatttttattygggatattgtaaatagatttgtttgtgaggtttaygattgggagtttgttattttgtttaagttygattyggtttyggygttygttygygttttgyggaggttttttgagttagygygyggttgtaggggtttyggggtygtatttyggattagygttagyggygggagagygttgtttgtgagyg

SEQ ID NO: 11097 - DNA, 1460 bp, Artificial Sequence
  Description of Artificial Sequence: Synthetic polynucleotide
tyggggtagtygagttatttttttaaagtygattttygggagagatttttagttggaygtttttygttttttaggagygatggttgtaattatttygttygtttttayggggygtttttttaatttttyggttggttttttttttygtagggtttttttyggtttatygttttttttttgyggttttttyggttttttaggtyggatygaggttagygtttgatttttttggtttttagtttgtttttttagtgtttaagagygagaatatygttttygtttatatgtaaaggtygggygtagtaaatgaagtgggaaaagagaaaaatagataaatygttgtggtataaaagatttttttttygttygttttgttttgtagttygggtttagtaggagagggttggggagaattggataaaygttttggaatttataaaggtyggtggtgtygggggtygtaaagggagtgaagaattgaagtagtgagttggataaattyggggtaaagtattaaataatatggatattttggtaaygygtgygygtgtgggtgggyggataaaaggatttattattygtatgattgttttaattttttattttttttgtgtaygtgtgtggaygttgttttaggttygagttygtttttygtttaggaygtatagtttygggtygtggttttygygygttyggttgtgygtttygggtttttggttygygyggtagttatagtttggyggggtttgygyggaggaggtyggttaggygtaggttgtygattttttttatttygtttagagtagtgygtagtttttgygyggaygggtagagtagtyggygygttagttygygyggtatygtygttyggtygttgaagygygyggygagtaygaaggggaaatygaagygygygyggtattgygygttgagttyggttagtygtagtygttygttygygtttaggttttttaggtttgygtygttttgttttygttgygattyggtygtgagygtgtttygttgtagttygttgttygttaggttygggtggtagygtaggatgtttttttggtttgyggagaagtatagatatyggygggagygygttaatygygttygtttygtatygygtattygagggggygygtaggtygygttyggtttttttgtttygtttygtttygttyggttttaaagaaggttgygggagggtgaagtagagtatttaggyggtgatgttttggyggaataggggygtttttggygygtttttttaataagttttggattttgygtttttyggtttttattatattyggtygggattaggatttaggggyggggygggaagtgataygtttgttttttgagattttgggttaagaagagyggaggagagagagggyggtygttgaggttyggaatttaygattaggtygggagggagtagagaygyg

SEQ ID NO: 11098 - DNA, 1064 bp, Artificial Sequence
  Description of Artificial Sequence: Synthetic polynucleotide
tygygygattgaggygttagyggyggagttggayggtttgggaaggtttyggtttttyggttgyggttttagttyggayggygtygygtaattttgttatttttttggtttagtttyggttataggaggatttygygggtaaygygyggagtttttggtatttttyggyggtgttttttgttgtttgttyggggatygatttygtatgtttttaggttgatttgtttaagttygaatatygggattatgtatttagtygggattttygggttattttygygtyggataggtaattttattagtttttaattaggatygttatygtygtttyggttgttgttgttgttgttgttttttttgttattggtaagtygygtttyggtatagttygttgttttyggtagggygttgttgttttttggtttygygggggttgtaggggtttttgttgaggaggttatagtgttggygaatygyggatttygggtgtttttyggtygtgaagtttggttggattttttgtatgatttggtgttgtaggtgtagttyggggatygttgygyggtttyggtattagataaygaygtattggtttagygatygggtygtttgagttttaagygtttttygtgygattttggttttggygaggtgygttatttttatttgggygygygtagttygtttygggatygygttyggttgtagttgygttatgaygygttyggaggggtagtagtgttattattggtattggaggtggaggtggtttttatttagttggaggttgtgattyggaatttgtttttggtygtggaagagttgttggggattagtaatgttttggaygygyggagtttggagttygttttttagttygagatagaggagtgtygygtgggtattttgttyggtttgggygygttgtttygttatggagaatttttttattattygtaggtttttggaggagttagagagggaggygtttyggagatttttttgatggattgtaaagttttttaggaattaggygtgygttatygttatatagtygttagtyg

SEQ ID NO: 11099 - DNA, 622 bp, Artificial Sequence
  Description of Artificial Sequence: Synthetic polynucleotide
tygttagttagayggtgtttttgtygtttttgtygttattygttgggtttygtttygttttaagygtattttyggttygtagggtgggaataygaggattatagtgttttaygggygggygggttaggatygtaatttyggyggagtyggygtttttgggtatttttggttttygygtttyggtygtayggtgattattygggaggggatttygggygtttygtaatttttyggttttygtgggttttygggtygtttygtttttygtygtygygtatttttygygtttttyggttttyggtgtyggttttygtttygygtagtttygagtttttagttyggtyggttttttattygtygagygtatttatggyggyggtttttagggtttttgygatttgtyggygggaygtgtttttggtaggtgttattttttygatttgaygtttaggttyggtttygttgttttaggtatagttttagttttgygaggyggggtygtyggttttattyggggggyggtgttgyggggagtagaggttygtgttttygagtygtygygygtggatattagtttyggtttaggtgygggtgggtttygaygggagygygtggtaggtyg

SEQ ID NO: 11100 - DNA, 1622 bp, Artificial Sequence
  Description of Artificial Sequence: Synthetic polynucleotide
gygtttttaaaatygagtttatygttttttttttttgygtagtttttatttttttttgtgtttygtattttaataaaygttttygttaagtgattttagtttgaaatatgyggtttttyggatttttttttgtgttatygattttttgygtttagtttttyggagttgtyggtttaatttygtaagttttttyggaattygtgttttttttttgggtagygttattattaygagygtttatttgagaggaygtttgtttttatttagtttttattttgtagtygagtaattttygtaaaaygaatatttggtttagtttttgttggaaatygttgaatagtttttattgttttttggaagggtttgggtagttyggygtggygtttayggttttattaggtttttgttttttgtaggtttygttatttygttattaaagygttygtygygttygtatttgttgtgaggttgtgttygggtygttttygtygagggaayggtttttttaaggttttgygttttaattttygttygtttgttaagaggtagtygtgtyggggagttagagtttttyggggatttttttttgtttttygtggttttttgtggaattttygttttaggatttgtaygtygtttttagtygygygygyggtayggagatygttygttgtgtttygygttgygtttttttygtttttttttygygtaggtttttttgtgttagtyggttgtygatttaggttaggaagttygaggtyggggygttattttaagggttttttygtttttttttygagggtagagaggygttygygttyggaygtattgygggaatatttggagygtyggyggagttyggttgttttygygggagggagttygaygygtatttttgggattyggattyggygttygygtttygggayggatttttgtttyggttgtaggygtagygygtagatttgagtttgtttygyggaatyggggttygagtttyggttygagygyggygtyggggttagyggagaggggyggaagtygtaagggattttyggygtttyggtttggtygygatgaagttttygtttttttttaggtgayggatygtygttgtygtttygggttgtttattatttyggygygtgttygggagtttttatttttttygggttttgtggtyggttaygygttttaggtaygygtygygtygggtygygttattaagttygttgtttttagtttttttyggtagattttttggttatttttattttgyggaggggtygtttattagatgttagaaaattagggtggggtaygtaggttaggggttttagyggttgggtatygtgtttttttygaatttggtgttggaagtgygttygttttygttttttttaggtatttatyggtattgtttagttttgtttggagggtttaggattgaaygtttgttttyggtttttattttggttgtagaggattggtygggtgatgtygygttgttttggttttgggttygtttggaagattygtttgtgtygygggttttttttttggttttggtttttaaagygttttyggtatagtttttyggtttttgtagttyggtggggtyg

SEQ ID NO: 11101 - DNA, 324 bp, Artificial Sequence
  Description of Artificial Sequence: Synthetic polynucleotide
aygtgggttyggagtagggggyggygttygygtttgattyggtttgtyggttgtttgtygttygygtaggagttggtygggygtygtttgtaggttgtttygggtygagtyggagygaygttgtygygtatttgggtagttttygggggtygygttgtgttayggtyggggtygttgygattgyggygtttgtatttgttaygtgattgagtygggtatgtttttygggtttttgtgtgagtgttatgagtgggtgtgygagatttaygaygggagtatttgtgtaggtaagagggyggygttgttttttttttygggaggtyg

SEQ ID NO: 11102 - DNA, 1881 bp, Artificial Sequence
  Description of Artificial Sequence: Synthetic polynucleotide
tyggggttttttagtttygtyggggygtttgtttttyggttgagttygttygtagygyggttttyggttattggygaggttgtgyggaattagaaggtygatygygttygggtatttttygygygtttttgattttagttyggtttttyggaagtygtttgggygatttygyggtttaatattyggttttgygaaatygttygygttttyggttyggtttggagggtttygtattattygygygygygygygttygtataggattyggttaataggygtygggatttttggagttygttttgttagaaatttgttaygygygtygtygtatatgygttttaggttttttyggaygtaggygttatygatttygttttygtttygygtttttyggttgtttygtygygatttygggtygygagygttgtygtataggygttttaggtttttyggggtataggygtygtygatttygttttygtttygygatttyggtaygttttaygtttttygtattttagattygtttttttygatttttattggatagtyggggaaaatggygttttaaagygttygtatttattttgtygaaatgygyggtttagtgtaygggygtttagttatagaaggagtttttagaggttaggtgggygtggggtgtttgttgtagtagygagtagagygtggttaggttttygtygyggtaggygyggtgtagygggaaayggagygagagtagtttttygttggagaagttygtttttaygttygygttygttttygtygtygatatggttygttatyggagagygyggggttygttggtttagaggaygygtyggggaggattygagaagtygtygtygtagtataaaggaaygagattagygtygyggtygygttttataggttgtygagyggagygygtatagagggggyggggyggggtttggagyggtygggttgggggyggggtttggtttagaggaygttttgtgtagtygggtaggggtyggggtttggagtygyggatttttggagtygtygggtagggggyggggtttgagtyggaggtygtttggagtagtygggyggagggyggggtttggagttgyggaygtttggagyggtyggtaggtggyggggtttagtttagaggatgtttggagtagtygggtagggagyggagtttggattagaggaygttagtagtagtygattaggaggyggggtatggggttgtygaygtttggagtagtygggtattgggtttgggttagaggaygtttggggyggtgggygtttggagtagttaggtagagggyggggtttggtttgggtttaygtttggggyggtygggggyggggtttggttggaattgaygygtggagtttyggtggagggggyggggtttggttgggtygttgtttatagyggttttyggggtttggaggttayggggttyggaggttayggggttyggaggttayggggttggttgtgtggggggtttaggggygtagagtggttaagtagyggtttgagygggtttyggggttttyggygyggtgggtttyggttgygtttygggtgyggattatgatgtttttagtttgggagtyggttygggyggggaatttyggttgtygggggygygggttgaggttttgygggttygygtttagagygggtgggagttaygggtttttyggaggtttagtagygygyggtgaagttgtttagtaaaaatttatggagygtttayggggagtagggattttygttaaaatttgggaattagtaagttttagttttttatagagtaggatagatttttyggttttgttygagggaygtttttttyggaatygagtgyg

SEQ ID NO: 11103 - DNA, 944 bp, Artificial Sequence
  Description of Artificial Sequence: Synthetic polynucleotide
tygygtggggtttagggaggygygggttgygggggattgygtaaggtyggggtttttggaggtygaggtygyggtgtttttygygaggttattatgagttgagtgtttttggtaggygtttagggatttttygttttttttttttygyggtttyggygggygtyggttagatygtttygttttttygttagttyggaaygttttgtattttttttttyggttgttyggygttygttagyggttagaaattttygtttygttttatgtaatyggggatttygygttttygttgtygtttygttttyggtttagaggaygggtttggggggagggggygtgtggygaygttgttatttattagggtttagtygtygttttttygagttgggtyggtgtttygygyggttttgtagttttgtagygttyggggyggtgtaggagtttyggggtgtygyggygttygttyggttgtatygttggtttttyggttygggttttaggttyggygttttttatttttaggtygygygygtttygttttttygaygatttttagtttygggttttygttatttaygagttttygttttyggtgagttgttgtttttagggtttygagtygygyggtattttttgyggttygaggyggattttttgtagttttttgattatttgttygtatttttygttttttatggagtttaggtygttgtygtggyggtygtttagtagtygttttttttttagttygtygygggggttttttatggtttatttttgggggygttyggtygtttggaatatggygyggaygagttgygggygttgttgygggtgygttgggtygygggttgygygttgttttttygttggggygttggygggygggayggyggtayggattgttgtgggttttgtagygtygtygyggygttttataaayg

SEQ ID NO: 11104 - DNA, 1514 bp, Artificial Sequence
  Description of Artificial Sequence: Synthetic polynucleotide
tyggyggygttttttttatttagygtgaaatttaygaggygyggygtttygagtggygggygggtagggggttgtaggatttaygaagttattttygtyggggatygttttttttyggagtggtttttttttyggygtttygttttagtaagaygatatttaggttaaatagtygttttyggttagttygattyggttttggagggagygtttygagggagtttagtyggaggyggagaaggttattyggttagaaggtggggagtygtyggygttttttygtattttygtttttatagtagggggaaaggttttgatygtygtggtttatattatygygtttatttgaggttygtttygttttttgggtttttagaggggtggygtatttygtttttttttgtttttaagtggtygtattttttygygggaygtttggttgggtttagggyggggygggygggygtttttygtattgtygygagtttagygygtagttttygyggttyggttgtygtygyggttagttggggygggtygggggyggggttttagggggyggggattygggggggygggtygggtygggaggygtgggtggggggyggggyggaygyggagygtttttttggttggyggggttaaggggttgagaggagtggggtaggttyggygtyggtaggaagagttagaggggtgattagagagtttaaygtttggtgtttaagatttttttygaggtatgaataagaattaggygtttgggtttttttygttygttttatygtttagtygtygygtttyggaygttygttgtgttttttgtyggyggggyggyggygggattgggtttygggagggtttttggaagtygygagttttagygaaggtagtgtatygtttttygttttttttttygtttttttttygtttttttagttttgggtgtygggtatyggtggtaaggtygttttttygtgagtyggaggtygtttattttgggaygggyggaygaggttttagggtagtygagttyggtagygggggaggygtggagttyggggyggttttagyggygggggygggaggttggttttggttgtagattgygygtttgggtttygtgygyggtttttggttttttgtatygyggaggttttyggattatagggttttttggygggtttyggtatttaggtttgtgtygttgtggttgggygtygggattagtattygagtttygygttttygggggttgygtygtgtygtttgttgtgygygygtagaggtyggatagttyggttgygggaagggattygagygtagggtttgtttygygtttyggaaagtgtttagtttgyggagtyggaggttgagttggggtagatyggygttagaygggggtttgggtgagataygagttgggggtgyggtttgtagaatttgggtttttggaggagtttayggygygttggyggagttttaggygaataggagtatyggattyggtttyg

SEQ ID NO: 11105 - DNA, 2144 bp, Artificial Sequence
  Description of Artificial Sequence: Synthetic polynucleotide
gygtygtttttttttygygtttttygaatgttaagtgtattagtttttaattttttttttgggygggttyggtttggttaattttagttgtagattttagtataaatttaggattttttttygtttagtygtttttatataaggattygtygaatatattttgaatttygygttagagygtagttyggaattgtagttygyggygygggtttaggtygggggtygygygtttttagtyggtgatttaaggtygttyggttygggggtgggtgtgggtyggtaggatygattagggtygygygggggtagttgtygggygttyggttatttagyggtgggagtygaggttggttttggttagtygttatttygtygygggygtttgtttygtygggttttygggygygggaggaaggttygygtygttttttattyggygygttttttttttagtgygtagtggtttggtgggttagtyggyggyggttggagygyggggtyggttttgygtaygaatgaatgggygttygggggaygygygygttyggggttgaagggtattaggatygtgaggatygtttygygattttgtttttttttattattttttygtttttttattttttttttttttttgttttgtaggattgagtagttaggygygagygaaaataaatagttggggttgygagygttttygtttyggtttygagagtaygtyggtttagttttttatttggggygttygtttgtttattatgaggaagattygygttaatgttatygttattttgatygtagtttggattttgggtattttttattatttatggtaggataatygagtttaygtagtatttttyggyggtyggggygygtagagggtaggtaggaggtyggagtagtttygygaggatygtattatttygtttattgtgagtaygtttygagygtyggtyggtyggttagggagtygyggygygygtttagattttgygyggyggtygagggygyggggttyggttagggttgagtgttygttgygtygggtyggttttgtatatgttggagtatttttgttygttgttatggtaatttttgtygggyggyggggttggggygtatygattaagggagggtgatagagggtgggggttgggagaaagtgttgtaagtttggtgggttyggygtgygygygyggttgggaaygtggyggttttttyggttttgygttgtyggggtygggagtttgggggttgygggagtttygtgtgtttyggaaggttgtygggtttagygygyggygagygggyggtgggaattattygtagtygagygygtaggtggtagtgygtagtttttttttagttttttgggggtagaggatatygggtgggggygtgggtaggggaaggttttttaggygttgygtttggtttygaatttttttttgagtygggttaatttgaattygttttttyggygyggatatttagttttttyggagttttttgggttgaggagaggtttygtattgtaygygttttttatttttaattttagggttygttattaygggtaggtgggtagtgttagygttygaatttggygatatttttgtatgaagttagtttygygatatttaagygggtagggaaataaaggtagtgtggtatagygggggyggyggyggggttgygggggtttttggygttttggggattygggygggggygtgyggagtygtagtygttttgtagggggygattttgtygtygttttygttygagttttaggtgatagagttgtgygtggttaggtaggggtatttgttgaggygggaggttttggtattygtygagagtgygttygagygggygtatttttttagaygggggyggttggtggaygagagtttyggaygattttygggaattattagggyggggtagtttggtyggatgaggattaggaagaggagagtygagtggggygggggtaaaggagtgaggaagygtggygatttygataaggaaagatttgggtttgggggtggaggggtgaggagattygygggggaggtgtaaggttyggagggttgaggtttgtgtggagtygaattygagaaaygtatttagaygyg

SEQ ID NO: 11106 - DNA, 379 bp, Artificial Sequence
  Description of Artificial Sequence: Synthetic polynucleotide
tygttyggyggggygtttttaygttgtgttttttgyggtgtatygaggygtattyggttgttttgttgygggttttttggttatttgtgggttatagggagagaygygtttatatattttygttygygtttaggatagttgygggagtttygggtygttttaatttaatgygtttttygtaggttgagatgyggttgtttttgttygtgtygttgttgttggttttagygttygggttttyggtgagtgyggttttgtttyggttttyggaggaatttgtaggggagtygggggyggggaygygygggttygtaggtaaygtttttaggaaaggggygatgttagggaagttgggttgggaggaggygagttygtatyg

SEQ ID NO: 11107 - DNA, 637 bp, Artificial Sequence
  Description of Artificial Sequence: Synthetic polynucleotide
tygyggtaygggagtgygtaygygygtyggaggygaaggaggaatttatygtatttatagggyggtygagtgagggagttgttggygggtgggtttggtaattttttgggaggtygaygygggyggatyggygggtgttgggaatygagtttyggtttgyggtyggtagttttygtgggtttgtgaagaggtyggyggtttttgygggygttagttaggtaagtttagttyggtgttttttaggaagttygtttgygggygygggtagggagtygtatyggttatggtggttgaggagggagaggttgttgttygtyggtygttygattttaggttttttttygaygggttygtttyggggagtaggggtgygygggggttgtttttgygygaayggttygggygggggaygtggggygygttgggygtygttygtyggtttaggygygygaatttggygtttttagtgaattattygyggttygggygttygggttygggatyggtttttttttttttygttgagtygyggtygagttggttttttgtattttatttagygtygtygggaygygattatatygagatggtatygagttttttttaaaggtttyggtttgttgaaagtggggyggyg

SEQ ID NO: 11108 - DNA, 959 bp, Artificial Sequence
  Description of Artificial Sequence: Synthetic polynucleotide
tygygggatyggggggatggtygatttttagataygggagggattgagygatgtttaaggagagtaggagaatattgygtttggagatttttgagagttaggggygggtygttttttaaagggatttyggagtttygatttttagttttagttttttttgtgatattatttttyggatagagatttaagttttaggttyggtttygtttagaggttttagggagaagattaggttatygtttattgttyggygtyggggaggaaagaggaggagtttttgtgtgtttatatttttggtygtttagggtagttyggttyggtttygtaattttagtttattggttygggagattttaaaggttttatygttagygtttttagygtttattgtgtgygttttattttagttttgtttgygygtygttttygttattttygttttagtttttgggtyggaagtttttttttttttttygtygtagtttttttttagttttttttttttygtygatgygggaaatttttttygtttygtttygttttttttttttagttgtattttygttyggttttttygtttagtttttaatttaggtttygtttttttttatttatttttygttttgggtygggttttyggttttatygtttttttttyggtttygtttyggttttyggaagttttatttygttttyggtttygttttttygaagttttttgggttttyggtagtyggygggatagaaygyggagagtygtygtttggtygggygtagaygyggtggtagagttygygyggygttggaagygagtggyggagyggygggatttyggyggattygttatggaggaggaggtgagggyggggttyggyggggygttgggttggggttttygagttttttayggggattgyggttttgggtttaggttttygtttttgttygttttattttyg

SEQ ID NO: 11109 - DNA, 826 bp, Artificial Sequence
  Description of Artificial Sequence: Synthetic polynucleotide
tyggtygttagttttgggagtttyggttgggygaygaagttgygggttggggtatyggttgtttttaygggtyggttttgatttaggggttyggttyggagttgttttttyggyggyggggttgatttaattttttttgttygaggagttgtygygygtagttagygtttygaattygygygyggttyggygttttttyggggtttatttttygggttagtygtygygtttatttgtgttygyggttyggttttttttygttygygttgttttagtyggggttgaggtatygggtygggttttyggygtttygagttttygttttttttttttygttttttaattygtttaygttttyggttttttggatggygaygyggatttgtatygtygttttgggttygggtygagttttttygtyggattgggttatggttygygggattgyggygtygtyggggtttttaygtygtaaggtttagttagtyggtyggtagygattgygaygagggggygggggyggtgygagygygtttgtygttyggtttaggggagggataggggtygyggygtttygtttygygtygtygtygtygtygtygtygtygttattatttygatygttagtggagygttygygtaggyggggtttyggaggtggagggyggtttttyggagttttttygayggaggttygtttyggaaggattttygygattttygattatttttttygttttttygtygttgtggggttttagttygagaggaggtgttagggttttttttttttgygtttttttttayggygtygtagggatgggyg

SEQ ID NO: 11110 - DNA, 2156 bp, Artificial Sequence
  Description of Artificial Sequence: Synthetic polynucleotide
tyggtygatttgatttttttttgttygygttttayggttttttggttgtygaatatttttagggagaatttgttgatttygggttggagtatggtttygaattggygttgtatgaagtyggtttggtttaggygtatttyggttttygggaggatttggtygtyggtagtygygtttttttttattttgatagyggtgtttatygagggttgttygtaggaggyggaggtyggttgyggtggttgttggggyggyggyggygaggttgygggttgygtygaggygtyggggygttygggttyggtygttaggtttgggggygttttgttttygtygggggaygygtygttttyggygatgagtygtygttttttygyggagttatgtaggtgttygtgattgttgtygtttttygtgtygtygttgtygtygtttyggttgtttagygaggttaggttttygyggaagygtttgtagtygtygttygtgttggatttgttygygtygygggtyggtttttygttgttygttgtttygagggtygagtttygggatttygtgttattygyggtygtygagggggagggygagggtagtggtygtagtyggatgtttttgyggttggggttttggyggttttyggttttttttttttyggygttttttttttygtttatgatttaygttttggtttttatttgttgygggaggttgtagagtygtttgygtatggayggyggtagtttgtttatggygttaggggtyggggtyggatygggtygggggtaggagygyggygtygyggaygggttttaggttygttygtyggttagttygttygtggggaygygttttttgtygtyggygtgggggtagttttaggygtttatgtttgggtaggttgygygtygyggggaggattttagtttygtttygagttttygggttygtygygttatattttttttygggttyggttgggygyggggatttygygttttttttttgtttttttttttttttttggygtttaggggygyggygygtygttyggttttaggygtttygttttygyggggaataatgggygtyggtyggagaggttttgyggtygyggygtttagggaatygtttyggagtgtagagygtayggttygygygggtttygggygtgygtttygygggagggttggttgttygtttgtttygtygttygggttttgtggttggttattygygagttygtttygttttttttgtttyggttygttyggttygtttyggggttttygtygtaatygagyggagtttagygattygtygggtttatattagyggtygtttttttygaagygtttttyggtagygttygggttttygygtttyggaatatttatgaagtygtygtagttygygggttgttataggagyggttttagtagtygggtttgtttatttgggttttttaaaggggtagyggygtaygggtygggggttggaaaggggyggggggygggtttggtaaggggtttaggttagattttygttagattttyggggtyggggtgagaggtatttatattgttgygtttttaaattttttttttgggttaagttgggagtgygttttaagtttgaagtttyggttttagttgygaattttttattttaagattgaagggtggggggtggttttttaatttttttattattaagttttgggttygtttttttttggtatttttgttttttagttgggttttygattttttttttgggaggygatygggttygtttggatgtagagtttyggttttttygtaatttttttggagagggggttttyggaaatgygtygygtyggggaggtttttayggtttttttgtgatatgggtagggtgygaatttygygttagttttttttttgtaaagtttygtagtagttaggtaaggagggygtggggaaatagggagataygtatagggygygygggtgggatttagtttttygaggtaagatttygaggaaatgygtyggtaatagtgayggatgygagattygaaygtygattttygtaygygtttttttttyggtagtttygagaaagggataagtyggttgtagyggggagyggttgggtyggtttttyggayg

SEQ ID NO: 11111 - DNA, 1441 bp, Artificial Sequence
  Description of Artificial Sequence: Synthetic polynucleotide
tyggagggaggaattatygtaagyggagatttygggyggyggtyggyggaagggttgggygggaggygtygggatgtyggtaggattttgygttygagggggtagggggttygtgtyggggttttaggygtagattgatggggtttaagtagggaatgtgagggyggggagggygtataayggaagggattaatttygyggtttygagttgggagtaaatttygttttttattttttttattygttttttttttttagtgaagayggtttgggggygggtggggaggygygttttyggagygttttygygtttttttttygtttttygygygygatttatygttttttttttttygaggttagygatggttygggtgygggygaggagttgggagggyggttttygaygtaggtgttagattygttyggtagtgttyggygygttggttyggtttttagttttttyggtygtygtttttygttygtygygtygyggygttaggagggyggggtyggggygygygtygttttttagtaagygggygggyggygttyggtttgagggagyggggyggttttygtyggygtygygygygttgtgtgtgagyggggtygygygygygygyggtaggygagtgagggaaygaggagyggtygggtgtgagtgtgtgggagtgagagtgtgtgggagtggggtgagggagaagttgaygggaygygaggttgtgagaaattgggygagtgtgygaggaygttyggttagtttgygggagtygtagtyggyggaggagaaaggaggyggttttyggtatttygattttttttttttttttttttttttttatttttagtygttyggyggttygygttttttygaaggttttagttyggtttagtyggtygagagygagggaggagtttttygatttaggtgagyggtaygatygttgttgttttygggtgtagagtagtgaggygaaggygygttttttygagtgggygagtttagyggaatggatttttygattagygggggttgggtyggggaggggatyggttygagygygttyggggttyggggttagttgaggtyggtggtygtygtttygyggagtyggtggggagygaggyggggttyggttttygygygtgtgtygggaggygtyggttygtggygtgtgygtgygatygggygagtygtgtygagggggyggygatttygggygtgtaaggagtatggttttttygtyggygagggggtgtggtaatttygggaaygtyggttggagtyggattygygggttgttgatttgttttygggattgyggygatatttttttttttttttttttttataaattttatggagygatygygggaggaggattaygtggtgyggtttygtagttattgtattygattttaygtttttttttttayg

SEQ ID NO: 11112 - DNA, 734 bp, Artificial Sequence
  Description of Artificial Sequence: Synthetic polynucleotide
tygattttgggtatatagyggtaaattttgtttygtaatatygtgtgggttttygygtattttttygygtgagygtttygagttyggtgtagtttyggttttygygygtttttgtttttygtatagygttttygtttygaaggtgttttgataatttygtaggygttattyggagtyggggtagggtagttggggttggaggyggygggygygggayggagttttatgaaagttggaagaagtgattataaatygggattygattttygtagttttggygttygtttttttaygtaggttygggatgtyggttttagtttttagatgtygggaagayggygtyggttagtttaaggaagagtttttaggaggttggggagtaagggtgtygggttttttatgtygggttaggttttttaggagtgtyggtttttagggttattaggtttaggtttgygygaggagggagygygygtttttttttatttattyggttttygtttttaattygtttttyggtttatatttatttgtttggttgtaagygtygtttygggttaggtagttaggtttttatttttagtgyggygygtttygatgtygttatygggattttygttttttaaattagttttttttttattygtaatttygttygtyggggygttygggggyggaggygygagtyggtyggygtygyggagtyggttygtagatagggygggyggggttyg

SEQ ID NO: 11113 - DNA, 935 bp, Artificial Sequence
  Description of Artificial Sequence: Synthetic polynucleotide
gygtgygattygygtttattgtggtttygttttattgatgatygtgaatttgtagggtgttgggttagttttttattttaaggttgggtaggttttyggagtttttttyggtttagatagaagtttttttaggagygggggaggggaagggggygygyggttyggttttaggtgtggtygyggataatgagattttggggatgggggygtatttgygttayggygtttygtagagggttttttaggagattttttygggttttygtygygtygtgggggtggggtagttttgttggttagagtygggtaygggtygggygggyggyggggatygtgatygyggttgygtgygttygygttygggygtttttgtgyggggttttggtaygtyggygggggygattygggtgtyggttygtgygggygataygygygtttttgyggggttgygyggggttyggagyggttgggggttttttgtygggygyggttgggygyggggggygttttyggtygggatgagtttatygtagtygygtyggggttgagygtygagyggggyggyggyggggygggyggyggtttttyggyggtttygyggygttygggtygygygtygttatgttgggtttggaygygtgygagttgggggygtagttgttggagttgtttyggttggygttgtgygttygaggtgagygggtygggtaggggyggggggttyggttggttttagtttygggyggggagtagtttttttttygyggtaattttgggggygygtatggggatttygyggygtygatttttyggttggggtttggtaggggtgggggattttatttaggttttagttttgtggggaagggattaggtgyggaygggtyggtttgggaagyggyggygttgggattttttttttttggatatygtyg

SEQ ID NO: 11114 - DNA, 1054 bp, Artificial Sequence
  Description of Artificial Sequence: Synthetic polynucleotide
gygyggttttyggaggtygatattataaygtttgtaagggtyggttggggtyggtatatgattygattttayggtygtttttaggggtggaggggtygttattttaggtttggggaaggaataygaggttttgaggagygaatttgttttaggtgttyggggaggtttggygyggggttgtttyggtttttttttagagtyggggagaggggatatygtaggatgtyggygttygaggyggtagtattaggtttaygggygttttagtttaaatatttttygtgtttttagagyggggattttygttttttagattyggaagygtygtttttttygttagggaygtttgggttttygtagatttygtyggtyggygygttattygygttagtattatggatagyggtygttttagtygygygtttagggttaggttygggttggtttttatygyggayggttgyggggtyggggtagtttygtaattttaaatttyggtagttttygtttagtagggaggggtttygggggygaagagtgggggagaagtygggaaggattyggaggaggyggygggggyggygttaggggaggaataatttyggygtagtgtygatttaggttgaaaaygtttttagttatgggtttgtaygtggagygtyggggttgggggaggtattygyggggtttttttttygtttygttygggagtttaygtttgtyggygtttatagtttygtttttatttttaggttttagggtygagatggagaaattaagtygtattttgagagtttataggagggaggggataggttgaggagyggtygtttgggtatgggttyggggtttggttttttttatttatattygtagygttgttagaaggygttgttttgtttgtggttagttttygattygtgtgtttggtgggagttgtattttygtataggtagttttattgttttttaatttygygtttaygtttttgtyggttttygttgttttttatattttyggtttgattgatttagttygaatattttttatttyg

SEQ ID NO: 11115 - DNA, 1474 bp, Artificial Sequence
  Description of Artificial Sequence: Synthetic polynucleotide
tyggaygttgtggtagaggaggttygygygtygtatatttgttgggatttttagttygtttaggattggtagggagattttggaagattagygttyggaggggtgaggtttygttttgggggtaaggtygygaaattayggtttgtagttttaygttaggggtataaagaaaagygtygtygggaatttaatatttgtagaygaygygtagtygtagaggaggyggggygttygaggtttygtttygtatgttaatgaagtatatattatatygtttygtttyggygygagatyggtttaaygttgyggagatttagaggtyggyggygttyggaaatattygyggaggtygaggtagggyggggtygggygtyggggtygggtygttgggygggyggtatagttygggggaggttaaygggtyggtygggygtttyggggaygygttttttttayggtgygaagtggtayggttygtaggggyggggtttaggttatgtgaygyggtygyggtygttattttgttttgyggtgttggtatttagagygtagyggttgaygggtyggatygttttygtygtygttygttygtaaattttygtgttyggttygttttygttttygttttygttatygtttyggtttgtagagtttgttttttttttattygtagatatgttygagtttaagagyggtttygagtatgtttygtttttygtygttatgggygtttyggtygttatggtttttagyggtgagygyggyggygggagggattygggggygggggygygygygttgtttatgttygtagttygtyggggttyggtgtgtgaygttattttgaygtaatttygagttgtygggggygttygggtttygtgtgatagygggygggggtyggygtttygagggttgyggggagtygtygggggttyggggygtagggygtgygggtttggtyggggtgtgagtttygggggttygggtyggyggttttgttagtygggtygtgyggttgygggggtggggyggyggygtygttgttatattagtttygggagyggygagagggaggttggggtgggggygygaggggggyggygygaggggggtygattttgygggtaggtgatattatatttygaaggttttagtgygygggyggyggygygggttyggtttaggaaygtttagtyggtygttggagtttttyggttggtggggagtttatgttttttaygggaggtttttagttttygtttttatggyggtyggtttygagggttaggtgggttttatttataggtaggtattttyggttggagttggttatagttgtttaatattygtgtygttgtgtgggttgtttgggaaagttgggttgagggtttggttyggagagttygyggagattygggtgggagtgtgtggaagtggagggagyggggagatagtagtatyggygttggyg

SEQ ID NO: 11116 - DNA, 357 bp, Artificial Sequence
  Description of Artificial Sequence: Synthetic polynucleotide
tyggagaatttygtatatataygtattygtaaataygygggttttttgygttattaggaagtagtygttagaatygtygggtgttttttaattatttttgggagatttggtttttygttttygttygygygygyggttayggygtttttttttttttygggtttttaaggtyggattatyggtttygttgttatggygaygtyggtttatttttttttattttygygygtttttaygtttttttttygtagggagttggggtttttttttttttttttttaygttygtagggatttataggttgataggagtagggggtygtttgttgttatyggtyggggatttyggggtttttyg

SEQ ID NO: 11117 - DNA, 814 bp, Artificial Sequence
  Description of Artificial Sequence: Synthetic polynucleotide
tygtygggagtttyggggttyggttttagtttygggttgaataagtagggaggggagaggtatttaggtttygttttttygyggttttttttttttagtyggggaggaggagatttaggaagtygygttyggtttyggtgggtggagggtttaggtygygttttttagtttygyggttttaggtttyggttygttygaggyggagttygggaggtyggggyggggtttygggtyggttatttatttgggttgttagttattttagtttygygaatagttggtgtygtygttgtttagtygagatttyggggttttgyggtttattatttttttygataygatatggttaagygtygtygttygaatyggtygtygtygatatttygtttyggttyggggttgaggaggaagtygagaaggaggaggaggaggyggyggyggagggygggggaagaggayggtygtttygggtttygtttgagttygtagggtaggaygagggagyggygyggtgagagaggyggatgaaggygaggygaygttttttttagggtygtgygyggtttaygaygttggggtttyggaggaygaggaggaygaggagtaggyggtggyggtagttttttaygtttatayggttattgttttttygtttttyggtttygttygtygygtygtygttgtygtayggtaagttgggagygagaggyggggtyggtttygtygggtttggggagagaggygggttttgtyggyggggyggggtygatagtaggtagtttygttttttayggttttaggtttttggayggyg

SEQ ID NO: 11118 - DNA, 847 bp, Artificial Sequence
  Description of Artificial Sequence: Synthetic polynucleotide
aygtaaagygtttttttttttattttyggagatggtaygtgygygtttttaygtagtggyggttgttgyggygagtaygttttttgygggatttaygyggggagtgggttggtagtgygygtatagyggyggygagtgggtygtgtaygyggatgyggggtgggagtgggggygtaygygygggygtgggygagygggtttyggtagtgtatatatayggtaggggygggygatagatgtagtgygtgygtyggagtttaagygtataaayggaaagagygggygyggtgygtaggggygggygtttagygggtttggtatgygygttttygttygaggttataaaagtatygttatttgttgttattagttaagtygygygtttagttgtttggagaagttygtttatygtttttagttgttgtttttttygatatggattttgagatttgtttttgtttttttggtgagttttygttttygttygtattttgygtattgygygtttttgtatttgtaaagaaatttaygttttgygttttygtttaaggatatttgggggaagggtttttgattttttattttttatttygtgaagggygggtatgtttgtgtygyggagaatagggagatttggtattttattttttygtgataggygtggggattygagttygtttatattaattttttttgtggygtygttttttttaggtggtttttgtatttgygyggatttttgtaagtgygagggatgtaaatgtattttttgtaagaagagtgagtgyggggattttttttttttgtygtygttttttttgttttgyggagtyggtgttttattayg

SEQ ID NO: 11119 - DNA, 589 bp, Artificial Sequence
  Description of Artificial Sequence: Synthetic polynucleotide
aygggggtaggygtggygtttttgggattgtyggaaaaygaygtgagggaaaaatttagaggttaygaaaaggygaatagayggagggtttgttttaggggagttaagtagttygtttgaagttttttatttggaaatgaygtgtttaattyggygtttttgtagtttyggtygtttttttttgtttaatttygygtttttttagtttyggtygtttttttygtygtttttttttygyggtygtttatttttgagatttttggttttattgagaygtttagttttattyggtaattygyggatattaagygttataaatttaaataygagatttagagaygttgggttttaaaygttttttagagtgaaagatagaggaattaatygaggttyggttgattttagaygtttaaggygataggygttgttaagaaaagggggtgggaygatatttagttgttaagaygayggttttygggtgggyggtttgaggtggttttyggtygttaggygagatttygygggaaaattttttgttagagagattaggagatttggggttgyggtygtttttttyggagtatttayg

SEQ ID NO: 11120 - DNA, 848 bp, Artificial Sequence
  Description of Artificial Sequence: Synthetic polynucleotide
acggggtcgtattcgagtcggcggagtatttttagggagggggcgggaggttttttttgtttagtttcgagtcggtggtgtagcgttcgttttcggtcgcgggcgtagattggcggtcgttttcgggttacgtggtgcgcgcggcgggcgcgttcgaggagtttgcggttgtttttggtttatagcgtttcgggcgaggagagcgggcggacgtcgggggttgggtcggtgcgggcggcgaggtaggcggacgaggcgtagagatagcggggcggtcggggcgcggtagtcggcggcgtcggggtcgcggtttttgttttgtcgtttttttcgcgtcggattttcgcgtttagggcgtacggtggagagggacgcggcggagtcggtcggtagttatggaatcggtttttttcgtcggcgtcgagttgtagttttcgtttttcgttaacgtttcggacgtttattttagcgtttgttttagcgttggcgttaatgcgtcggggtcgttaggcgcgcggagcgtttcgtttttcgttttggtaatcgttattatcgcgttttattcggtcgtgtgcgtcgtggggttgttgggtaacgtgtttgttatgttcggtatcgttcggtgagttcgttgcgggtcggcgtcgtagggttggagttcggggtgagggtggggattacgaatttgagattttaagttcgttttttggatttttcgcgttttcgtattttttgtaggggtatttggggtttagcgagaggcgaggttatttatatcgaggggaatataggaatgtgtgttatcgtgtgtatgtgtgtgtgtggtgcgggggggggagtgcgtcgcg

SEQ ID NO: 11121 - DNA, 1230 bp, Artificial Sequence
  Description of Artificial Sequence: Synthetic polynucleotide
acgtagtttcgagtttcgagtttcgtttcgggggttttatttcgttttttcgcgttcgcggttcgtttttttttattgagcgtttagttttcgtagttttttcggtcgtcgagcgtcgtgggcggggttttagggcggcggcgtttcgcggggagggtttttcgtgttgggggcgaggttattcgaggtagtttttcgttcgtttttaatttcgtttcgttttcggagtttataaagggaggcgattcgcggttcgttcggttggtattttttagtcgtcgttagtttcgtcgaggggagttagcgtcgtttttgaggggcgttcggcgtcggagttatgatttttcgtcgatttaggaagttgtagtagaaggaggaggcggcggttatttcggatttcgtcgttcggattttcgattcggaagtcgcgttcgtcgtttcggtttcgatttcgggattttttgtcgtagtcgttatttttgggtttttagcggacgagttgtacgcggcgttggaggattattattttgtcgagttgtatcgcgcgttcgtcgtgttcgggggtattttgtttcgtcgaaaggtgcgtttttcgttcgtttttaggatttgtttagttttttttcgattttttatagggtttgttgatttcgtagtgtttttttttcggcgttcgcggagttttttattttttttttcggttcgttgggtgtttcgatttttcgcgtttttcgttgttgcgaaggtcgtggttttcgtttgtatatcgcgtttaggttcggtggtttttaatttcgcgttttatgtacgttttttttttttttttttgattttttttagtatttttttttttttattcgttttatttggttttttgttttttatgtttcgttttttcgtggttaggtgttttgggtttttaggagtttttcgttcgagggatagagatagttttaggtaagttgaaggttcgagagttttcggtgggagaagcgggtcggtggttgcgtcgcgtgcgtttttattttgaggaagtgcgtggggagtcgttgatttcggatagtatattttttcgaggggatttttcgatttttgggttgggggtttgtcgtttggttttacgtttgacgtacggggcgcgagggttattgttttttggatttttgtcggaatcggacgtagtgggaggggtcgtagggcgttcgcggggtaggaaggatgcgggtcgcg

SEQ ID NO: 11122 - DNA, 1094 bp, Artificial Sequence
  Description of Artificial Sequence: Synthetic polynucleotide
gcggcgttaaaaatagttggggggagggtgcgggggcggcggagtttgtaatttaagtcgttttagttttcggggggtagatttcgcggtcgtcggtcggcgttcggtttttttagtattcggtttagggttggagttggttgtagggttggttcgcggcgatttgggtagggtggcggttgttttttttttttttatttcgtttcgaggcgtagcgcgcggtagagcggttcggtgttcggcgggcgggcggttcgggcgggtttgcggtcgggatgaggacggcgttttcgttgtagagcgttggggcggcgcgggtcgggagttcgttggcggcggtcggcgtggcgggcggagcgggtttcggagcggaggtgagtgcggatgcgtcgtttgggcgcgcgcggtgtttggggatttcgggttggaacgcggggcgggggtgttatcgggttgcgcgggggttttcggttcggttttcgtttttgcgttttcgggggtcgtttttcggcggggtcggatttttttagcgttcgcggcgttcggttcggttttttcgatttttttttttcgggttcggacgtgcggggtagcgagcgtcggggttcggcgggggtcgtagttttgttcggagcggagcgttggtagcgcggggttcggtttcgtgggtagtttgggaagcgttcgggtaacgtattggcgagggtcgcggagcgaggggttcggggagcgggattttcgggcggggttgcggggagcggggttcgggtcgttttatttatcgcggatcggagtcgggggtgttttagtcgtgtcgtcgtttttttcgggtcgttcgttcgggcgtgttggtttcgcggcgtttcgagcgcggtataggtttgcgagtcggcggtgttagcgtttcggacgggggtgggagttttggagtttattttgggggagattacgtcgtattttcgtttagtttcgcgtatttttagaggtttttgtagagtcgggaagttggttggacgtttagattcgtggggacgcggcgtttcgcgtggcggcggtcggaagggaaggttaatggggttcgggggattttcgcg

SEQ ID NO: 11123 - DNA, 1979 bp, Artificial Sequence
  Description of Artificial Sequence: Synthetic polynucleotide
tcgttatcgttatcgttttttttttagttattttttatattcgttcgtttattttttttttaatattttttatacggttgttcgtatttttgttttttttcggtttacgcgcgttttttgtaatttcgacgtttttaggtttttagttcgtttttttttttcggttcggagttcgagagtcgtttgtttttattttaaaatagcgataataatagggacgttgagaataataattacgattagtacggcgaaggcgtttttttcgcgggttagaggtcggcgttttagtttcgtagaattcggcgttcggttagcgttttttggtagtttttttcggtagttttaggtttttaagatttgtaggttcgtttcgaagtttttcgttcgttttttacggtcgtttcgagttttcgaggttcgtttcggagttttttgttcgttttttacggtcgtttcgggtttttacggtttttaggttcgtttcggagtttttaatcggttttttagagtcgtcgcgggttttcggttatttaggttcgttcggagttttcgttcgttttttacggtcgatttaagtttcgtcgattttttaggtttttttcggagttttttatgggttttttacggttatttcgggtttttaaagattttcggttgtttcgaattcggattcgtaggttcgtttcgggatttattattggttttttacgatcgtttcgggtttttaaagattttcgtttattcggtttcgattttttaggttcgttcggaggttcgcggcgtagtttcgtcgtcggggaaggtttgtaggtcgtaaggtcgcgcgaatgtttcgtgttcgtttcgattatcgtttttagattagcggcgttttttatcgtgtttcgagggttgcgcggtttcgcgacggtttagcggcggggcgcgggcgttgtttatgtagttcgcggtcgcgtttttcgggtcgcgcggttcgagcggtaaggcggcggcggcggcggcgcgggttcgggttcggtagagttgcgagggacggcgggaggcgagttcgtttttcgggcgcgtttacggttcgggcgagagtcgcggttttcggtgcggacgttattgatggggcgtttggtcgcgggttcggcggcggcgttttttcggttggggttttcggtttatcgcgtatcgttttagggcggtttttggttttaggatttagcggcggttgcggcgggagtcggtcgtatgagacgttttcgtttattggttcgtcgtattcgttatcgttattggttcgtttcggtcggtcgtaggggttgtgtacgttatagcgtcgtgagttagtgcgttaatggagtgaaggagagaggcgggattgatagtttttttggcggttcggaggcgggattaggaggacgtttcggtaacgattgggtagggttttgcgtaagggcgtatgcgatattggaagtagcgagtaattggattggttgttttcgtcgtaaaggagggtgggttttgtattttcgggtttgacgattggtttttttaagtgtcggaagtaatagggatgtcgtttggaaataaaatttggtattgaagcgtagggagataaaacgtttatttttagagtcgaggcggcggttgtttgtcgcgtgttcgtggttttttgtttgttttcggatatttcgggttacgttcggttcggttttcggtcgcgttgttttaacgggcgttacggggtatgaagagttttgggcggttgcgaggggagggtatcggggtagcggggcggtcgttcggggttttcgcgcggtgatttttgttttgtcgtcgaagagaacggttttcgggcgcgtcgcggtcgcggttttagagtttttgggtttcgcgttttgagagtttgagtcgtttgaggaggttaagcgtttacgaatcgtattttttgttttgttagttagttttttaatacgcgaaaaaggtagacg

SEQ ID NO: 11124 - DNA, 1930 bp, Artificial Sequence
  Description of Artificial Sequence: Synthetic polynucleotide
tcgtttaggtagcgcgttgtttcgggtttcggtagggtggggattggtcgcgaaggttagagaaggtaatggtaggggaggttagtttttgtcgcgggtcggttgtagagcggacgtttcgttttgttttcggtttttttttcgttcgtcgggttcgtcgtgtcgaataattgttgttcggagttttcgtgacgcggagttttaattgttgcgattcggaagaagcgaaaaggagtttttttcgtttcgtattttgagcgttcgggcgtgtaaacgtgggtggcggagagcggttgttttttttttttttgtttttttttttttcgcggcgttttcgtgtgtgcgggtgtgtgagtgcgtgtgtttttttcgtttattttcgtatacgtttcggtattagtgtaggcggcgagtcggcggtttttcgttcgttcgtttcggtagttgcgttttcgtttcgtttcgtcgtcgtcgtcgtcgtcgtcgtcgtcgtttttgtagtcgtagtcgggtatggtgagtgagtgaggtttagtcgtcgcgcgttttttcggttcgtcgtcggattttagttttaatcggtttcgttttagggagttagtttgcggcgggagcgcgttgcggggtcgggcggttgggggattcgggcggtcgagttgcgtttggaggggcggttcgtgcgttttcggttttaggcgcgtagggtcgcgggatttcgttttgggagcgggttttacgtttttttcggtttcgagttttttttttcgagggttgcgcgtatttttttcgttcgtttgttcgcggttttttttttgttttcggagcgttagtcgttttatttcgtgatcggtttttcgttttgtttcgtaggattcgttcggacgggattacgtcgtcgtcgtcgtcgtcgtcgttcggagtcgcgtttcgggttttgtttgagtcgagtcgcgcgcggggtcgtagttatcgtcggcgggggatggggttgtttaggaggcgcgtcgagttcgtagggggagcgcggagtcggcgcgtagtttgagagttcgagtagttcgcgtcgggtcggttcgtgcgtatcgcgcgtcgtcgtcgttattgtcgttcgcgtttcgatggcgttatcgtttcggagtcgttgatcgtttagcgtttttagttcggttcgcgcggcgggtttttcgagttcggttcgtcgggggagcggtttgtcgcggaagttttttcgcgttttttcgttcggtttcgttatggcgttgcggcgttttttgttgttgttgttgttttcgttggagtttttggatttgttgtttagcgtttacggagttcgcggtcgcgtcgttaatcggattttgagtgtaggcggcgttgtcgtcgggggtcggagggtcgggggcgttttggtacggggcggtcgcgagttgaacggtatcgttcgggcgttcggaatttcggaggcgggaagtcggcgggggtagttcgcggcggttgtggcggcggcggttagcgcggtcgttatttacgagacgtgttggggttattacgacgtgagcggttagtacgataaggagttcgagtgtaataatagcgagagcggttatttgtattgttgcggtatttgttattatcgtttttgttgtaagaagcgttacgagaagttggattagcgttagtgtattaattattagagttcggtgtgggtatagacgtttagtattaaggtggtgtcgtcggggttcgagaataagtacgattcggagaaggataagattaattttatcgtttatattatttgcggggtgatcgttttcgttatcgtggtcggcgttttcgttaaggttttttacgataaggtttatcgttttttacgggagatgaatatttataggtgagagcgtcgcgtgtcgcgcgtttcggttttttcgcg

SEQ ID NO: 11125 - DNA, 3177 bp, Artificial Sequence
  Description of Artificial Sequence: Synthetic polynucleotide
tcgcgttagtttcggggtttttattttggcgggaagggtaggtcgattcggtagattgcggtttttcgggagggaagaaggtgttagacgcgcggagtaattataaatagttttttttttttagaagacggtacggggtttaagatttaggcgtcgtatatttagaatgagagtagagattttcgttaggaaaaaaaggtatttaggggatttgtttattagtatgaaatgtaaatgagttcgttcggttttatttatataattttgtgtatggattcggcgaaagggtaattagggagacgacggcgtagtagttattttgttattttttttattttttttttttatcggtcggggcgggaattgagacgattttaattttttgcggtggcgggaggtgcgcgggggttgcgtgggtggtgtagttttaggagagtgaataacgtttaggggtgatggttttagtaaagtgaggggtggtgatggaggttattcgatttatttcgtcgttttttcgtagtggcgtaagcgttttaaaattttcggagagggaattgattgatttattaggtttcgtcgtgtttatttttcgtagatgttggggaagtgtttttcggcgtttaattttcgttgtttttttttttatcggcgtttagtatattcgcggcgtttcgttttcgggtatttatagttttttggagtggcgtcggcggtaggagagagttagagtcgattgagttttagaattcggggaggtaggcggggtaagggtcggggtttgcgcgtgcgtgtgtacgcgtggaaagtataaatttacgagggttcgttgtcggtagggttaaggtgagtgagtgaaggcggtagattcgcgaagttttagtttcgcggatattttttttttaagttatatagggatttaagagaaattgaggtacgaagttggggggtggcggtggtggggattttgaaggtcgagtcgataaagtttagttttgtgttttcgtttttttttatatattcgagatttttataggtttttttttaggggttttcgttttgtttcgtagttttttttggggattcgggttttgcggtttagcgcgatttgtttggggttacgtgtttaagtacgaagtttttgcgtggagtttacgttttttaaaaggtttttaggggtaaagggatgaagtttaggagcgttaatgtgaggttaggtttagcgggttagggttacgaggttagggtcgaagttttagaattgattcgggagtatgattaataagtttaagagatttgtggaggttacgtttagattatgtttattttagtttttttcgagtttcgttcgtttttttaagattgggtttttttagtttgaagttttatttttaggatatttagtttcgtttttttttttttttagtttcgtagttaagtttaattttagggtgggagattaattaggtggagatttgggatttcgttttgggattttttggtgataatttttattttcgtgtcgtttgtttttttttttttttaggttcgtttagagttgagtttcgtttttcggttgttgtttaaattaggggtcgtggataaaggatgtttggggtttgcggttttacgttaggatttcgcgtcgaatattttgatttttcgggttttttttaagggagttttaaagattttaatggttaataggaaagtgggttcggtttgggtagtagtttgattggttttagttttcgggagcggatttaggggtaaggggaggggagaggggcggttttgggttttggggtgggaatcggattttagttgtggttttttttttgcgttttcgttcgtattgttacggcggacggttaatgggcgcgcggttcggggtcggcggcgttcggcgattggttgcggggttgtttgggggcggggtcgaggtttgaagttgaagtgagggatttagttgtggtgtgcgcggggtttttcgtcgtcgttttcgttcgttcgtttcgcgtttcggtcggaggaggaggttgtggcgtcggcgatagttacggtagcggtagttatcgcggcggttgcggcggcggtattttcgtttttattttcgttcgggattgttttttattgttttttcgtttttttcggatagtgagttcgcggcggggcgggggaaggagtcgtttttattttttttaagtttatttttaaagagatttttttttttttttttcgtcgtttggcgcggagtcgggacgatgttgattttttagattcggttttagttgcgtcgcgggaagagggggcgttttttttcggattttcgtttttcgtcgttgttttttttttcgttcgttttttcggggcggtttcgtcgaaggtagcgtcgaattcggtaatcggagtttgggcgcgaagcgaagaagtcggaataaagtgagggggagtcggtcggttggttcgggaagttttaggggcgtaggggaagcgggattcgcgtcgggcggggtttttttgcgtttcggcgtttcgcgggtagtatgtttttgcgggtagggggagttgggttgaattggttttttcgggggtttagtttgcgttttagagtttattagatgtgttttcgtcggggttttcgggttgcgtgaggatattttttttgaggggcgtcgtttgttttttttcggatcgttcggggtttcggttggttagaggatggacgaggaggaggatggagcgggcgtcgaggagtcgggatagtttcggagttttatgcggtttaacgatttgtcgggggtcgggggtcggtcggggtcggggttagtagaaaaggattcgggtagcgcggatttcgaggcggaggggttgtcgtattcggcgttggtttcggtggtttttttttatttgagttaggatagtcgttcgcggagttggtgttttcgtacggtttgtaatttatatttttcggggtacgacggttaggcgcggggttagaagggggacgggtcgtatcgtcgggggtcgggggggaagaagatttatcgttaggtgagtcgaagtgagttcggagggtaggcggatggggggggggttgttagggaggggagggggtattagagtgggagcggagacgcgagtaggtttcgtcggtaattcgggtttattttatttgcg

SEQ ID NO: 11126 - DNA, 2195 bp, Artificial Sequence
  Description of Artificial Sequence: Synthetic polynucleotide
tcgttagtttcggtcgttaagtaaatattttttttaggagttcgagaagtcggtgtgcgaggggaggaattagtttgaggtttatcgttttagtaatttcgggtgatttatagagtttagattttcggttgtcgtagatcgcggtaggtacgtaaataagtagttcgggagatattttttttttttttagttttcgtttttttattttgttattttttagttcgtgattagttgttttttttttttttcgcgggcgtttagggttgagtaaatatttcgggtcgttcgtttcgttattagttggtttcgatcggcgtatcgttggcgattttttaggtaattcggcgttatgagaatcggtatttcgagattcggcgttttgtttttttttcgcgtttttagggttttggttaggtttaataattttttttttttttgtgcgttttagtttttacgggtttttggcgcgggttaattaggtttcgttgcgggtttttaggattgcgtattttatttttcgcgaggttagtagtttcgggggaaggcggtcggaaaattttttgtttatcgggttggataagtattagtttggattcgttttttaatttttgcggtttagttttagtagatttttggggtcggaggggaaagggtggtaatttatagatttatttcggaatagggagtggggggtggggttggtgggaatttgattttttggaaaggacggattcggagttagagttaacgtgtttcggagcgtagaggtttagggggtcgcgttaaatattgtatttcggggaataaaatcgtgaaggttaattaggataagtcggagtagggaacggggacgtcgggaggggagagcgcgtttcgagttgggtagaatttggaacggttataggaaattcgggcgcggggtagtcgggtcgagggggatttttgtttacggtttagagtggtttggattcggtttacgcgtgagaggagcgtttggtgacgattttacgtacgtttggtgattggtggaggttttagagaaggatcgtgcgtgtaaaaggcgaatttcggtgtgcggtgtgtttacgtgtgtaagttggggaggggagggggcgtagaaggcgtgataaagacggattttgttttgagtgtgcgtttcgtttcggttcgtttttagcgaattgtgtttgaagtgtgttttacgggagggttaggacgaaggtgataaaggttaggtgttttttacggagacgcgttaaggtagtttcgcgcgtgttcgtaggcgcgttttttggaagacgcggtggggggtgcgtagggttgtatttttatattaattgtttcggcgaaggtcgagtttagaaagtgagtgcgcgtgagtgtgcgcgcgttcgtatgcgggggcgtggtagttaatagtaataatttatacgtcggtagggttagaaatttttattttttttattagtcggaaagtacgagtcggtttagtttggaggtgagtcggggcggggagggtcgggtaggttttgtttttgtgtaaacggagcgtacgtatttggagcgcggcgggcgttcgattagcgttttgaatggaggtgatgtaacggtgatgtaggttttagtttattttcgtcgaaagtaaggagttttgtttggggataggttcgcgcgagagcgagtaatttagcgcgtttggtttagtttcggttttagggagaggtaggttttgcgtttcggttcgggtttcgttattttagttaggatcgggtttggtttagcgtttcgcgtcgcgttttttttattttcgttcgtttttcgtttggggttggagttggttttaaacgttgcgttggagcggggtcggcggcgagttttaggtaagggttgttgttttttcgtttcgtcgttcggaagagtcgggtcgggacggcggggagtgggcgagggtagaggcggggggattggatattttgcgggttggggacgtcgcgttaatttcgttcggtcgttgaaagtttttaaattcgagtcggttggggattgggggggtgggggagttcggcgttgcggttcgggttggagggaggggaaattattttataatcggggtttttaagaggagtttttttatcgtttgtttttcggtgggagttcgcggttattttttttcgtgggtggcgttttttttgtcg

SEQ ID NO: 11127 - DNA, 2063 bp, Artificial Sequence
  Description of Artificial Sequence: Synthetic polynucleotide
tcgaggagtcgtggaatggaggattacggcggcgtacggagtatcggggaggaatcgtggggtgcgtaggcgtcggagcgttcgggttcggttcggatcgaaggtttgcgcggtgaaggtgtggtgtttgtgtttcggggaaagggttgttttttcgggggattgtttcgtagcgaggtttgttttgttcgtagttgggcgttttttggggagcgattgagcgtaagggcgggtcgggaggcgcgaggcgagtacgatgttttagggttttaaggattcgtgtgcgtgtgcgtgtgtaaagtggggcggtgtagggcgtgtgtacggtacgggcgagacgcgcgtcggtgcgggcgtcgggcgtcgtcgggcgtaattatagtataaagttcgggcgtcgcggggcgttggttcggagaatttatcggacgcgtagaatcggatcggtatttttttcgttagtattttaacgcggagttatagcgtttagggatcggagggtaggcggcggcggtaaaggatattacgtaagtttttacgtaattttttcgagtagtgtaagtttttaggattggcgcgcgtttcggttattcggagcgcgtatcgttcgtatttcggcgcgtttttcgcgcggtgtagggaattatagcgcgggcgggtattaaggggaaaggaggaggcgtggtttggtcgaggagttaatgggtcgggaggggcgcgcgggggaggagtttaggtgtagagtgtcgattggttagttcgtttttcggtatgtagatacggtgggagttacgtgttaggggtcgggacgattttttgttggaggttaacgcggggcggggaagggggcgcgagcgtttcgtttggttgaagcggggggaggggggtttttgttagttagagtaataagatggtcgcggtggtagtttcgtattttagcgcgacggtttcgggagtcgtagtcgtcgtcgtcggtttcgtcgtcgcgtagttttgagcgtcgttcgggtcgttttttgatagggtagttttagcgttcgtcgcgttttcgtcgtcgttatcgtcgtagtagtcgtgggttcgttcgagtcggaggcggagggagcggagcggtttcgcgtttagtcgttcgtagttgttatcgtcgtcgtcgtcgtcgtttaggattcggatttcgtcggagtcgtatttcgtcgggcgtgaggaggaggacgcgtcgcggcgttgtcggggtcggatttggatttgtcgggacgcgtcgtcgtttattcgttcgcgtcgtcgtcgtagtcgtcgtcgtcgttcgcgtcgggatttgagttcgtggcgtcggcgttgagcgggttttcgtcgttcgcgtattttcgaggttttcgggcggttgttcgtgtcgtcgtcgtcgttaggttcgcgttatcggagtttcgcggagtcgtcgtcgtcgtcggggacggagtttaggtgagcgcggtagttcgttcgtttttcgtcgtagtcgtaattttgtcgggaggttcgcgggttttttgttcggtcgagtcgagtcggggcgggcgttggtttttagcgattcgcgtgcggcgttaggtttcgggtcggtcgggtttgaggggagcggcgggaagcggtcggggtcggggcgcgtgtgtgttagtgtgagacggggttgtgtagacgttcggtgtgtattataattaaacgggagtggaatggagggttgaagatggatgtgtttttttttttttaaaatttatgtagcggtgaaattcggtttttttcgggtagtttttcgtagattttgtattggtgatggtaggcgcgaattcgtcgtgttttggtgtaggagttcggtgtcgttgtttgggggaagagaaaaattcggggcgtgttgcgggtgggcggagaaggatttttgggcgttttgcggttttgaaattaggtggattttttaacggtgttgcggattgcggagtaatgcgtatgaggaaaacgagtcgtataatatttgttttgttattagataacgtaattcgagcgtttggttgtcgtttttgttttaagcg

SEQ ID NO: 11128 - DNA, 816 bp, Artificial Sequence
  Description of Artificial Sequence: Synthetic polynucleotide
gcgttcggagtgggaggaggggaggcgttgttcgacgcgtttttttaagttttcgcgttttttttcggcggcggttgttcgggggcggtggttcggcgtcgtttttttcgatcgttttttttagggtttttttttcgtgtcgcggttaggttgttcggtcggcggcgcgttggaaatatgaagagacgttgtagttgcggtggcggtggcggttattgtagtttagagcggcgtatgcggcggtcggggcgggacgcggggtcgggcgcggagaagtcggggcgggcggtagagaggtcgggacgcggatcgggtcggggcgtttatagtcgttcgacggcgtttagagagcgcgcgtttcgtagtttcgcgtttagttcgtcgggtatggggcgcgcggtagtcgtttgaagtttcggtttggttcggtcgtattcggtcggaggcggagggtagagcgcgcgtttagttgttcgggtattaaatcggagcgcggcgtgcgggaggttttagagtaggattggaaatgttttggtcgcgtcgttttttgtttagatatttgttttcggtttttttgttttacggtgagttttcgagggttattcgagcgtttttagtcggcggaggtagttcgggcgtcgcggagttcgcggaggcgtcgggtttggatcgcggtacggtttatattgtttttttggcggggcgggttcgaggggagtttcgcgtttgtcgttttagttttgggagagggggttttgtttatttttcgaggtttgggatcgtttttttttagggcgttcggagttttttgttgcg

SEQ ID NO: 11129 - DNA, 368 bp, Artificial Sequence
  Description of Artificial Sequence: Synthetic polynucleotide
tcgttttttttatataggcgcgtcgggaggtttcgttttttggtcgcgcgattcgggtatttacgtttcgcgtagcgtcgcggtcggtttcgcgtagtagtattattcgtattatttcgttgtggtttatttgggacgcgatttataggggcgttgtttcgttttgcgggaagaggaggcggcggtcgtcgtgattggggcgttcggttttattcgtttatagaacgtttttaatattaggggtttgaaagcgaaaatttcgggaaggtattttttgatcgtagattatattttgtagttgatttatatcgtttaggaggtagtgagaaaagagggggtgtgtgtagtttacggacgtagacggtacg

SEQ ID NO: 11130 - DNA, 1411 bp, Artificial Sequence
  Description of Artificial Sequence: Synthetic polynucleotide
gcgggtttttatttcgtcgttaggagttttttttataattttgagaatcggggtgcgaagaaagaaagggcgaaagggtcgtttaatttttagagagtagttagcgaaagattcgaggggttttttttcgtaggatttcgaataattgtagtatttttttagttcgcggggtttattaaggagatttttataaataatagtatttgcggcgaaggaattattttcgtaaagggtagaagcgttagattttattagttaattatttagacgcgtatcgcgattcgtaagttcgggtacgtttcgttcgggcgtaggtagcgggaggggtcgggtacgttcgtgggggtggtttgggtacgggtttgattcgggggcgcgttcgggaggggtttgggtttgagtcgggggcgcgttcgggggagtgggttgggtttggggcgggggcgcgttcggaggtgggggagtttggggtgggggcgcgttcgtgggggtggggtggggtgtttggttcggggacgcgttcggggaggcgtggtttgggtttgggtcgggggagagtcgggtgcgtgttttgggtttgcgcgggggagcgcgtttggtgtttagatgtttggtatcgagcgggtgggggacgtcgggttcggagtcggcggtaagtttttttttggtaggtaataagttttttttgtagttttgaaggcgttttggttagggttattttacggttcgggtttttagagtttttttacggtttcgaattcgagtagtttttggtttttaattcgtttcggaaaggtcgtttttttttttaatgtgtggcgcgtttcgatcgttttttattcgtggaataaaagagtagttttcgcggagcgggtttagagtttgttcggattgttcgatggttttcggttttttgagcgtcgcggttgtcgggttttgtgttcgcgcggggggcgggaaggacggtcggggtttttagtgcgcgtttcgcggagcggcgcgcggcgttcgaattggaaagttgtcgtcggcgtttgtcgtttttacgtcgttttagttttttttcgcggggcgttttatttattagttaggagattgggcgtagggtcgtcggggcgggcggggggtttattttgtttttgatttttattgcgttgtaatcgtagaatcgtaaggtttgagatttgtgaaaatttcggtttatggtttcggtttcggttagtttcgtcgtcgttttcgttttttaggggtcgtagaaagattttcgggggcggcgtttttaggtttcggtttcggtttcggttcgcgttcgtttggtcggcgggttgttttcggtgttgcgggttcgagttgggttggtcgcgcgttttagggattttaggggtcgcgcgcgggaggagcgcgggggacg

SEQ ID NO: 11131 - DNA, 1487 bp, Artificial Sequence
  Description of Artificial Sequence: Synthetic polynucleotide
tcgtttttgtatttcggggacgtgattttttttttaggttgattcgtttttcgttttgtcgtttttaggtggaggaggagttgacgtatttttagaagaaattaaaagggatagaggacgagttggataaatatttcgaggatttgaaggacgcgtaggagaagttggagtttacggagaagaaggttttcgacgtacgtgtgtagggatgcgggagttcgcggcggggttaggtcggagtttcggggtcgggaaggcggggagagtcgtagggggaggaggaagaggaggaggagaaggcggcgttttttagcgttttttttaaataagtttcgaaaaggggtattttttagtagttgtggttagcggtgtcgacgttaggtttttttttagcggtgttgacgtcggcggttcggtcgggtgattttatcgtttcgacggtagtcggttcggggggcggggagaggcgggggcggttttcgcgtaggtaaaggtttggggggtcggggcgcggttgtgtagttttcgtcggagtcgagtttagtcgagcgttcgtcgttgttcgtgcgtttttgcgttttcgcgttatggtcggttttaattttttggaggcggtgaaacgtaagatttaggttttgtagtagtaggcggacgaggcggaagatcgcgcgtagggtttgtagcgggagttggacggcgagcgcgagcggcgcgagaaagtgagcgtttcggtttcgggtttcgtattcgtagttttttttttcgcgcgttttttttttttttcggtttttcgcgttgttcgttcgcgcgtagttttcgggtcgtttttttacgttttcggacgtcgatcgtcgatttatatttttgcgttcgtagttaggattttttatttttttcgtcgtttttttttttgggtttgggataggggagggggcgtcgttttcgggtcgggcggggtcggttaagcgggaaatggggggatggggcggagggggtgagcgattttcgggtggagaagtggagcggcgggagggggcgtatcgtgtaggtttcgatttcggggttggcgtcggggtttcgggtcgaggggaattcgcgatcggatttgtgggggagaatgaggatgaaaacgtggagtttttattgtttagggtttgatcggtcgatagggatttcgacgggggatcggggatttggggagggggtcgtattttttcgtttttttcgcggtttttcggtttttgtttgtttttttgatcgtttttaggggcgcggcggcgacgtgtttgttttaggcggcgggggggatggggggtggaggaagtttagttttaagtcgttcgtttttttttagttgatttttgcgggaatcggggcggcgggattttgtttttttttagaaggtttcgggaacgttggcgcggggttttgaatttacgatcgtttgagcgtttgttgtgcgttttcgtcgcgagtcgtagggttcg

SEQ ID NO: 11132 - DNA, 602 bp, Artificial Sequence
  Description of Artificial Sequence: Synthetic polynucleotide
tcgttcggttaagttattttttcgttagtaggtgaggttcgtgaatagttaagttttttttggtacggcggaatcgtagtggacgcgtggaggggtttcgtagaggagggatttttgtttgggatgcggggagttgtagttttttatttgtatttagtttgttagttgtacgtttgtaggattataattttagtataaagtaggattgtagggcggtgcggatttttggagggagatagcgcggtgcgtttttgtcggttatgttggttggggtggtgttttaggcggttttagtcgttagttatagggcggtcggattataattttagtatataacgggagtggaggtggtgattttgagagagggtttgtgttgtgcgcgtttcgcggggtatgttgggagtagtagtattttagttgttttcggtcgttggtcgtagggttgcgggattataattttcgtatgaaatggaagagagggtggtgcggatagtttgaggaaggtacggatattttgagggaggtatggatacgttgagggaggtacggatacgttgagggaggttacggatacgttaagggaggtatagtagcggtgcgcg

SEQ ID NO: 11133 - DNA, 628 bp, Artificial Sequence
  Description of Artificial Sequence: Synthetic polynucleotide
tcggtattcgtcgtattatagcggatgggtgtatgcgggcggtgattcgagttcgcgcgggttgcggaattttttatttattaacgtcggcgtcgttatgggtttagggggttgggtgaggtcgtgagagtcggcgaggaagtcggttttgcgggttcggtcgatttcgggtttcggttttgggttgcgagggattttagttttcgtcgtcgtgtaaaatgtatataaggttcgcggcgtcgtttttgcgcgtcgtgaggatatagggttgtcgttaaggttttaggaagggttttgtagacgtttgtgggggtgggatcgcggttgatataaaagcgtgtaagtgggttttattttttttattgttcgtttttattcggtttcgaaaagtggtttttgtttggcgttttatttagtgtagcgttggtaattatagtagtcgtaatttaacggcggacgaagattggacgtcggaagtttcgtttacgtcgttacgggaacgtttttttgcgtttttcgtttatggtttggggtcggttttcgttttttgtagtattgttttttgggtaatgtagtttgacggaattcgggtggtatttggagcgtattttttgttttcggtgaggcg

SEQ ID NO: 11134 - DNA, 215 bp, Artificial Sequence
  Description of Artificial Sequence: Synthetic polynucleotide
acggagggacgggtcgtgtagtgtagtcggcggggttagggttaggtcgagggcgcgaggtggtagtcggttcggggaggcggaggttgagcgagcggtggtgtttgtggagttgtcggttgcggtggaattatgaaaaatagtaggtatcggagtcggtttttagtttcgattaggggagatgggatatgataggtgcgattaatacgtagtcg

SEQ ID NO: 11135 - DNA, 2638 bp, Artificial Sequence; identical to SEQ ID NO: 6376
  Description of Artificial Sequence: Synthetic polynucleotide

SEQ ID NO: 11136 - DNA, 2172 bp, Artificial Sequence
  Description of Artificial Sequence: Synthetic polynucleotide
acgggatgtcggtttcggtcgtttttattaattgatttatgatcggtttggttagggcgttcggtagcgagagcgtcgtcgcgtcgttgggaggtagcgttagcgcggggaagaacggcggttggtgatttagtatcgcgtttatggcgaagttcggcgttcggtgaggtaggaacggatggtaggttatgtttgttttaggaatgatcggattttttatggagaggtttatttattttaggcggggcgttgggttttagtcggggataagttcgtagttgttgtgttttgttgtttttttgttgttgtttaatagtagtatataatttaaaaggggggaaaaagtaaaataaaaaagaaagaaaaaagaaaaggaggtagaaattataattaatgtattttaaagggaggaggggaagtgttttttggagaatgggaggtcgtttttaaagagggtaaggcgaaaaattagtaaatatagtcgcgcgggtgatcgtttttgtgttttgcgtttttaaaaagtcgtttttgaacgtcggttttagaagcgagaggagcgagtagggtttcgattcgcgttcgagttttgtcgttgagttcgaaatagatattttagttttgcgttttaggaatttttttttagtttttaggttttttgttgtaaatgtgaaaggtttttttagaagattttttatttttttttttttttttttttcgttttttatttgttttttttttttttttttttgttggtggcgtttgtagttgtgttagattcggttttaatagggagcgagagagcggaaaaagttttttttttttaaaaaaaaaaaaatttgatttaaatttttttttattagcgttattaaaatttgaattgtaaattggttttcgttcgtcgtttttttttttttttttttgtttcgagttttcggagggtgtttcggttttaatttaaattttgttgggtttttttttcgtgttttttttttttttttgttttaaaacgtgagcgaattcgttttttaaatttgtgtttaggcgcgtagggtagggaggatttagagggggaaaaaatggaatagagggaaagagagggaggggagagagagagagagagagagagacggagtcggagagggagggagcgagagaaagcgagagtttttcgttatttttcgtcgtttttagaatttatcgggcgtttgttcggcggttttagaaggtcgggttgcgttgtgggttgcggggagtcggaggttttttgattggttttttgacgttttcggattaattgtgttgttgtataggcgtggtttttataggtcgagtgttgggggatagagttgagttataaaaagaaggtgtcggaaattgtaacgtcgtagcgtcgtatcggtattattgtttgttttgtgaatatgttaatatgattagagggcgggcgggagttattggggagcgcgcgcgtatagagtcgtttttaggtggtttatcgagagatcgttgtagtttttgagttcgttcgttcgttttggtttagtttacgtttgaaatgttttagttatttagtcggggattgagggaggaggtagggttaaggaggaagggggagggagagagggagggagttagcgagtaggcgagtcgggcggggaaggcggagagcgcgttcgggcgtcgggtaggggcgttcgttttttttgtatttcgttcgttttttcgatcgtcgcggtcggttttttttttagttttttttttttttttcgtttcgggcgagtcgggcgggtggtcgagttttttcgcgagttgttattcggttattcggttttataaaagtcggcggtagtcgagaagcgagcgtcgagattttaggtttgcgtgttttttagttttacgtggagttaagtttcgttcggtcgtcgttgaagggttttcgagttcgggtgtttcggtgttggttttttttgcgtttgggttgggggagtataaggatgcggttatattttagtatacgtatgtgtgggttttttttttattgcgttttattcgtagttatgtgcgggtatttaaatattttcggtgtatttgtattcgaatacgcgttaatatattgggattgaaatatatatcgaaaaatacgtatatataaatacgtatatagtttgcgcg

SEQ ID NO: 11137 - DNA, 2548 bp, Artificial Sequence
  Description of Artificial Sequence: Synthetic polynucleotide
tcgggtgggtttcgaaggcgaggatggttagaatatgtttttcgtgatattttttgtttttttttagggtcgtgcggcgagaggcgttcgagtattgttaatgtgacgcgggtttacggtcgtatcgtggggggtagcgcggcgtcgttcggggtttggttttggttggtgaggttgtagttcggcgggtagtttttgtgcggcggcgttttggtagcggttttttgggtgtttacggtagcgtattgttttgtagggtaagtaggatttttaggttttgtttagttggggttttcggcgttgggtttcgtatttgtcgggttgttcggcgggcgacgcgcgggaaaggtggtttttgttgttttttggcggcggtcggtttcgggtttttttattttaaggcgtcgcgttcgtttcgttaggatgttagttcggagggggtggtacggtcgggcgagttcgttttttttgggacgggattttttttcggttcgtttttcgtgtttttaggtggagaaagttcggtatgcgggcggaggggtagggttttcgaggggtttgcggggtgtgtttttgttttttttgcgttttagttgtcgttcgattcgtagcgtttcgaatgagtttttgtggattgtgacgttggtagaggggtttcggggggagtaagcggaggaggtgttagtgaatcgtattttgttttattttaaggtgagaaggtagtttttaggtttttaaggttgggtatcgtatttttattcgtgtttttttgattttgcgtcgtttttttttttttagtttgattcgcggattttttataacgatttggttttggtgtagttgtggacgtcggtgagttcggggggatcggcgcgtttcgtgtgtttgttttaggagttttaggagttttttgtcggaatcgtttgcgttatcgcgggttggggcgtttttttcgaaggtattgggcgtgggtgagtcggcgcgtggtgggaagaattgggggttcgaggtaatagagtgtagggaggtcgggttgttttggaaaaatgttgtttgtttttttaaagggggaggaattaaggggggtggtgggaaggggatttttaaggcggggtttttgttttttaaatttgagttttttattttttttttgtagacgggtttgaggttgaagtagtgagagaggttcgtgtttttttgtttagtatcgatatttgtcgaagagttttggggttcgggttgcgttttagtattatgttttgcgtcgggtatttggcggggggcgttgattcgtgttaggtatgaatttagtttgatgagaaaaggtcggttgagtttttttagggttattacggttttttttttttttacgtttgtttgttattcgatttttttgagtttttttgtttttatttttaaaatggatataagtggtaagtttatatttgttaggcgtaaggtaggcgttatagggggtaggtgaatgtagcgtttttttttttggtttcgtagggtgattcgggaggttttttgatttgttttgagtttggttttcgttttagagaggttttgttcggagttattttttggggggacggttgcggggagttagggaagttcggggtttatattcgcgtggtagtgtttaaggattggttttaggagtagatgagcggtgagcgttttttttttaatgtttcgtttttagtgttttaacggataatcgtgggataagttcgtttttattcggtttatgtttatttttagtttttttttgtttcgggaaagtttgttttttttcggggaaggagtgagggggttagggttttaaatagagggtgagttgatttttgtttcgttcgtagtagttttttttagtcgcgagtttagttgtagggagtttttggtttgggattttttttaggagttgtaggtagacgtcgttcggttttgcgttttttatgttcgtttgtgttcggggttttagggcgtttgtgcgcgtttggcgtattagtagtgtttgtagcgtcggcggcgatgcggttagttttgtttattcggattcggacggggggtagaggggagggggtttggttagtttttgatcgtcgtttcgatttttgttcggttcgtagagttgcgttcgttggcgtatacgttgttgggtttgttgcggaacgcgtaggagttgttcgggtttcgttcgggattgcggcgtttggttttcgttttggtttttttcgttttagcgtttagggagttttttttgtatttcgttcgggagttgcggttttatttaggtatttcgcgttttttagtttagtttagttttggttcggttttattcgcgcggtatagttatttttttcgtcgaggcggtattttaattttgtgtttttttaggatcgcgggttgtaggtattcggttttcgaagcggaggtcggagtcgcgcggagaagttaacggtaatgacgttttttgtcgatttttaggaggggataggttgagggtttggacgaggtcggaagcgtttttattgtagtttcg

SEQ ID NO: 11138 - DNA, 919 bp, Artificial Sequence
  Description of Artificial Sequence: Synthetic polynucleotide
acgggagtcgttgtagggttaggacgtaaagatttcgaggttttttaggtcgaggggacgtcgttttcgttttatttttgcgttcggtaggtttttggtttcgttagtatttgtcgtttagggttggatttacgcggcgggcgggtgaggggtttttggcgcgcggttatcgttcgttttgtgttaggtgcggtgcggtagcgggagcgcgcggagttcgaattttgtacgtgtggtttcgtcgggtcggtcgttgcgagtttcgtttcggtttcggttatcgtcggggaggacgacgacgacgtggtgggggacgtgttggtattgttggtcgcgtttttggtttcggggtcgcgggcgtcgcgcgtggaggtcgtttttttttgtcgtttgcgtcgggacgcgttggtggagcggcgcgcgttgtacgagtttggcgtttattatttggtgagtgtcggcgcgcgggagggcgggtgagttcggtcgggcgggagtcggggtgattattcgtgtttttcgtagttcgacgtcgagggtgtttttcgtcgcggttcgggtttgaatttgattagcggttagtatagggcgttcgtggttggtttttacgttttcgtcgttacgttgtacgtgggtgaggttcggggcgtgggaggatcgttcgttttgtcgtttatttcgtcgttcgttcgtttgattacgttttattttttttcgtagcgttcggggagtcgtcgaggagggggtcgtcgcgttttcgggattatttgcgtttgtttatttgtatttagtttcggtgttagcgtaacgcgtgagtgtatttcggttcggattttatattcgtattcgttcggtttttataagttggaggtggttaaataggtattggacggggttttcgttcgtttatattttatcg

SEQ ID NO: 11139 - DNA, 2488 bp, Artificial Sequence
  Description of Artificial Sequence: Synthetic polynucleotide
gcgtagttcggtaggggcggtcggattcgggtaaacgtagtttcgggtgggagtagggttatttttgttttcgagcggttggaataaaaatgcggattgtattttttttttttttttatttaaagtgtttagttttgaagataaggtggagggaggagagagagggcggaggtgtaaatttaatttaatttttgcgcgcgttttcgaggcggtcggttgttttcgtttcgtcgtgtttttttattaaggaaggttttttcgttaggggtcgttaacgttcgcggttttcggttagacggtgtatttgagagggatatttcgttttttttcgggagggattcgggtttgttgaagtgggtttaattttgtaaatcgcgttttaatttttcgcgtcgcgtcggggaatttttttttgatatttaacgtttttcgtttttatatttttaaatatagtttattttttttttcgtggcggtcgcggtaattcgagttcggttttcgtttcgtcgttagagaacgtttttttcgtcgggacgcggtgtcgagttcgttgtatatcgagcggtcgtggtataatatcgcggcgttgcgcgtataattatcgttttttaggattcgcggcgcgtatttcgggagtggggtgcgtttcgcgattttgggcgtttagggttagatatattttttgggcgtttcgcggtttttatagtgtagtttttatcgttttttttttattttcgggtatatttattcgtttttcgttttagtttattcggtttagggcgtagtcgttttttcgcgtttttttttttagtttcggtaaaggaagttttttttgcgtttttttttttagaatcgtttttagtttttcgtttttttaatcgtagtttaacggtcggcggtagtagtcggagaaggggggcggcggttcgggtttcggaaacggttcgatcgtcgggattcgggtcggatttcgtatttgggttggaagcgaggcggagatgggcggtcgggattcgcgagtgagcggggcgggcggcggtgatagttttatagttttagttgttgttgttgttgttgtcgtcgcggttgttcggggagaggggttggtattatcgcggcgcgttattgttcggttcgggggcgggggtggttaggaggagggtttaggcgagtagcggcggtagcggcggcggcgtcgcggttcggaggaagggggagggggtatcgggtacggggaggcgggagagggggcgggatcgggtacggggcgggggcgggggggaggggagcgtagggagggcgtaggtagggggagtaggaggagtagtaggaggaggtggcggaggggcgggtgagagggaggagtgggtacggggggaaggggagagaggaaaaggaggtatttagggagaggggagaggagaaaggagggagagaggcgcggggggagaagaggaggaaggagggggagttgggttaggtagggggggataagggcgcgttggacgcgtcgtcgtgcgtttcggtggggagcgcgtttttaagggggaagcgtttcgaggaagatttttgtacggggttgagttcggaaagaaggcgttgggatttgtgtttatttatcgttttcggaggttgcggtttttgggttcggtgggggttggggggagagggtattcggcgggttgtttgcggttaggttaggagagggagatttggtttaaataaagtgatttaggtatttttaggaattttcggcgttcggggttttttcgggtagttttcgatttttatgcgtttttcgggtttttagggacgcgggtatttgtggggcggggttgtcgggtttcggggttcggttttttcgggcggtcggagcgagatttcgggttgggaaagttaggtacgtggtcggttttcggtcgtattttcgttttatttttacggtagggtttttagtgtttgattaagtttaagttcgagtttttcggcgcgttgtttatcggttgttttttcgcgttttttttttttttttattcgtatcgtttcgttttttattttttttttgttttttttttattatttagtttatatttttttcgttttttttttcgttttttgcgggtattcgagtgttcgggaggcgtttatttgttcgatttaaatatttacgcgatttttagcgttcgtcgttcgcgtgttcgttttcgtttcgtcgtcggttattgtgtttcgttagtttatatcgggtcgggttttgacggcgcgcgagttatagttgtaaagtaataggataatttcggggacgtcgttttagtttagattcgggtacgtattgttcgtggagacggtatcgtcggggaggggagttacgcggattttagatgcggttttttaggcggatagatttttgttcggggcgtaggaggaggtaggattggtatcgcggggtgggagttttggattttcgagtaatttcggattcggttcg

SEQ ID NO: 11140 - DNA, 513 bp, Artificial Sequence
  Description of Artificial Sequence: Synthetic polynucleotide
acgttgttacggtaacgattgtacgcgtatttttggagggtggtttgcggttttataggtttcgcgttcggggaggagaggaggtggtcgattagatcgtgggttttcgggtttttcggtttttttaggttttaaattttttttattagagattttgtttggagtttttatgttagcgtttttttttatcggtttttttttttacgtcggttttagtgtattacgcggttcggcgagggattgggaacgggatagggacgcgttttaatttatttagcggtggagttggggggcggcgcggttacgtgggatggcgggtagtttaggggattcgggcgacggggtttggcgggtagggttgttttagtcgtttttataaagtcggttttttcgatttttttttttttttgtagtttttttttttttttttgggggttgggaggggacggggcgggacgttggtagtcgggagagtggaaaaggttgtatagagtttcgtgataagttcggtcg

SEQ ID NO: 11141 - DNA, 1766 bp, Artificial Sequence
  Description of Artificial Sequence: Synthetic polynucleotide
gcggatggtcggtttaggcgcgtttttttattcggggtcgtttgtgttcggtgtgtcgtgttcgcgggttaggggcgcggcgggaagttttcgttcgttcgttagttagcggggttaaataggttatttttttgcggacggtcggcgtcggagtttttttttcgttcgttcggatttattttcgtaagtagcgttggggttggagtcgggcggttcggattagtttcggtttatttgggcggcgttcgcggtcgggtttacgtcggggaaggtttcggtcgtcgcgagttttcgttcgagtttcgcgttttttagttatttatttgttttttacgttttatttattagcgcgtacggtttcggtaattttattcggagcggggcgtcgtcgtcgtttttgtcgtagttcggtcgggtcgttgggcgtaggggatttcgcgtcgtcgttgtcgttgtcgtcgtcgtcgtcgtcgttgtcgttgttgtatttttcggcgagcgttgttgtttttttttttgtttttttttcgttttttaacgtcgtcgttatcgttttcggtttttttttcgcgcgtcgttttagttaaagttcggtttcgtatttcgttcggatcgtttttaaatcgttttagttcggtcggttacgttgttttagttagttttttggtacggcgttatcgtttttcgttcgtttgttcgtcggtttttacgtaggggaggcgggcgcgtttcggggcggggagcgtcgggtcgggagtcgcggacggttggggttcggggcgcggggggtttagtcgcggtgtttttttcgagtttttcgcgcgttagcgtttttattttcggtttgggggacgcgcggttcgcgattcggttttgtttgttttcggcgtacggtttcggtttcggtttcgaagtttagtttcggacggggtagtgaacgtagagttggggtttcggcggttttcgatttttcgatgttttcggattcggttggtcgcgttttcggcgtcgagcgcgtattttcgtcgggatatatagacgtatatttattcgatatattttcgtttttgttcgttttcggcggagagttgaaatagatgtgggattcgtttaggagttggaaacgagggagggaagcgagttagagttttgtgtgtacgtgtgtgtgcgtaatatataaattagggggtatcgttaataaattaaatatcgtgataaatttaggagggttatcgattaggtttatttggttggaaacgacgtgaatttgtttttttttcgtttttttttttttttttttcggagttggagggagttaaatgtttcgcggggagtgcgatagtttcggtcgggcgtttttttcgtaatgatacgttaataaatgtttttttttatttgtttttataggattcgtttcggtttgtaaatattcgattgtttttgtcgaaagtttcgcgttcgtttttagttatatatatttgttattggagaggtcggcgtcggtcgcgattcgtagtttaatcgtagggtaaatcgagttgtttgtgcgcgttcgagaatttttcgagaaattaatttcggtttaagtgaaaatagtagttgttgtttagaaatggttcgggagtagtatagaaaggagaaatcggtttttttcgaaaggggaggaattggatttaagggggtgttgtttatcgtggttttcgttgtttttcgcgttatagaagaggtcggagggggatcggtttgacgcgggtgggtaaagagcg

SEQ ID NO: 11142 - DNA, 6511 bp, Artificial Sequence
  Description of Artificial Sequence: Synthetic polynucleotide
gcgatttcgggggttagtagagaggagaggttgcgggaggattcgttgcgaagggcgaggggtggcgttgggtgggacgggcgtttggggtcgtgtagggtggtttttgggtgttgttcgggttgtttgtcgtttagtattggcgtaggaagacgggttcgcgtagcgtttggtaatagtggtttgttttacgtttggaggcgattaagttttgagttaaaggcgtcgggtttagtcgggaagtgtatggcgatttagaatacggagcggagaaggttttaggggatacgaggttatcgttttagttttcgggtttgcgtttcgagcggttagggtgcgtacggatgggtttcgggatgttagtggagaggtgataggagtttattattttacggttaagcgtgtgaggttttcggcgggcgggggtttttttcggggtagggtagggggagagttaggtatgtttttaacgggttttttagtagaatcgttaggaaagtggtttttaattttaggtatttttgtggtttttaggtagttgggcgattaaaaatttatttttgtttgttgtgaaatgggataggtggttgttaggttagagattgtgtttacgaagtttcgtttggcgggtcgggattgacgtggattcgggtttttttcggaagtttgggaatttgtgagttttttagtttttcgttttattttgtttgtttgaaaaaaggagttgtttgagaggaagagttaaggtttaaaaggttttaaacgaagagtatgcggtttgacgcggagcgtaaagaagcgagtagtgaattgaatttggtgggattgagattagaggcgtttgtatgcggcggtcgtttcgcgttttattaaagtaatttgttatttacgataattatttttgtaattattttggagtggttgtgatttgatgtttgtggtgttttagggtatgtttttattggatatagatattttagggtgttttttgacgttagtgtcggtttagtgggtgttagtgtcgcgaagggagggtggcgggcgtgaatgttttttttttttgggtttgtcgtaggtttcggtttttttattttgtttgattttggcgggtttgttatttattgaggtttttatcggcgtttacgttgtttcgagaggcgggataaacgttcggcgcgtggcgcggagtttgcgaaagcgttcgggggtttttattttttgttcgggagttttttttttggggcgggaagaggagtcgtagatttgttcgaattttgttttattcgtttggtcgttttttttcgtttggggtgggggtaggggtggcggatgatttaggtttggggtcgggagttttgtttttaaaggtattatttcgcgtttttttggaagtggcgcgttgttggggcgttttcgttgttgtagaggtttggtttgcggttttataggggcgtgggtttagggtttttagggagtaagtgagtttaggttttttagggggcggtagaggggaattttcgataattttttatttttttttttaggcggttgcgaggttttcggggttttagaggggtttttttttgtcggtgtcggttgttttgagcgcggttacgtagttcgcgtttttacgtgggtaaggggcggggacgttggagggaggttgttttggatgttggagttttcggttttcggttttgttgagtagaaaagttgaagttaaggaagggttgaggtttttttataagggcgcgcgcgtgtttgggtgtcggtttagaagtcgagaatgtgcgtattggggaagggtttttcgtgtcgagaagatagaggatttgttttagttgtttttcgtatagagggcgcggaggttgcgttttagttcgaacgtttatttattggaaagagggtagcgtcggggtttagggaagttttttgggaatgaatggtttttgttaagcggtttcggattttttgggttttttgggtttacggtacggtgttgcgcgagtttttagtgtttatcggtttttttcgttttttgcgtagacgtttttaggcggggaggtatatcggttttttcgggtagttttggttagtgttgttgtgggaaaggagagttagggtttgggatgggggatgagtatttttttgtttatttcgggttttagcgtgtaggaggtaaatttgttagtatagataagatagtttgtttaagttgtattttaggtcgggttagagaataaaatcgagggttagaaggtttagaatgtcggatagtttagcggtattcgttagggagttttaggcgttcgaaagaggcgtcgtatttttggcgagtttaggatttatttttttggatttgtgttttggagtgtttgcgggtttgggtttaatttttgtttttggtaggtgtttttttttttcgtcgttaatattaggagcgttgtttttgcggtaatttattttatttttagaagtttgttttgggatcgaagtgttagggttttgtgtgtttttttatgtattgttttttttagtgtaaagttttgtagatatgtttggtcgaaaagttttagtggttttaatttttagattttgttttcgcgttcggtcggaaaattatttgggatttggttgttgtttaaggtcgggggaaagttttttttggaggacgtttattattattatttttttttaggtttatttgggtttaaataaatgttaaagtttaaacgaattcgagaaggaatagcgaggtagtggatgtcgttatttcgtggatgggagagttatgtttattgtaggtgcggatatcgtattgataggtattgattattgtaaaatcgtatttagtattaaatagaaatagttttgttttttaatttttatagaatgtttaaatttagtttagggagttagttggggcgttttaataaatacgttttcgagaattagcgatgttttttttataatgaaagttaattgttgtataataattgggttaaagaatttcgttagtttaaattttaaaaattagtattgtattttgtttttaagtttgggtggtaagtatcgaaggggagagggaagtagcgtttgtgtggaaggaagtttcgttttttgtttaaatatgtgggatttgggtgtttatttttttagtcgagagttttttgtaggtttttttttaattttttgtatttttttatttttattttattcgtggcgttcgggttttatttttgttcggcgttttttttttagggcgagtagaggtttttgagtgatcggttcgttagaggtagttgtagagtcggcgtttcgtagggtagggtagggtcgggtcgttgggttggtttagtgcgcgcgggttttttttggttttagttagtcgcgggagatgttatttcgggcgatagcggcgagacgtcgttgttcgtaatttttgggcgggtaggatcgtttgttgtttttgcggtttttggggtagattttttaggagttttttttttttttttttcgttcgggggtcgggatcgcgttgtgtttacggagggaattgggcgtttttggcgtattggggttttagttgtatgattttagtttagattttaagttttagtggggtgtaggtgggatgggatgtgtttttaggagatgaggagatttcggttgttgagtcgttttttaaatgcgtagttttttaattttaggtgatattcgttttttggaggaacgagtgaaggtcgtttaggcgaaagaggggtgggttttagtatttggatttttttttttagttttgttaattttaggtgtgtttacggtggaggtgatagaaggaaggcgcgtcgggggatttaggtttcgtaggttttcggttgttaacgaggtatcgtttattgatttcgcgtttcgttttttatagcgtggggttcggcgttgcgttaggttcgggtgcggggcggagttaggttgggattggttgggggtcgtttcgttcggcgtttgggttttcgcgtcggttttcggggaggagttatgataattttttttttattaaggcgttcgggtttttcggttatcgttaggatatattgttcgggcgcggtttttttcgttcgcggagcggttttgatattcgcggcggtagtatttacgttcgtagagtcgtcgatgcgtgtttagtgattcggatagtaaggttcgcgcgcggcgggggcggcggtagacgtttggttatcgtgatttcgattttggatttatcgtttgggggttggggggattttggatttaattggcgattgttttgggggacgtcggacgttatgttgtggaaaataatcgataatgttaagtacgaagaggattgcgaggtgagttggggtttcggggtgtagtttcgtttcgtcgaggatagttcgggaggtaggggttattggatcgaggtcggggacgagggtataggagttttggtttttcggtgggacgggatttattttttcggatattttttagtttatttttgcggggttttttttttgtatagggtttttttttaaatagttttttttcgggaacgaggtttggaaagagaatggtaaattttatttatatagtttatcgggcgtttttttaagcggtaaatagttttgtttttcgttttttcggaaaagtgtttcgtttgtaatttttagacgtggtttttacgtacgaagtttttgtttaaaggggttagatgaggttatttgttagcgatattttggcggatatttttttaaggtcggtttgttatttgtttcgttattttttcggggaagtacgaaaataatcgaagtttggtttttaaaagaagtgggggttggggagtggtggtgggggtgttcgaggttagatggggtcgtaagagttcgcgagtgttttagtttgtcggataggttgagttagagtttcggagagtgggagggaagaaggaggcggcgagcgggaagaggaagaagacgtaggtagcgttaggcgagtttaggggcgtcgggagcgcggagttcgggttacggattcgcgggagtttattgcgttttcgggttttggagggttgtttttgttcgtaggttcgggcgttttcgttaggaggcgatagcgttatgtttttttaggttttcggcgtttcgagatttttgggtagatggggacgtattttttagaaattgagtcgggtcgtttaggggcgagggaacgtgcgcgggtaaggttgtttaatttttagggttttttatgttttttttgcgtttcgacgtgcgagaatattgtttttggtagtgtagggcgtttttatttattatttttttcggttgggttcggttagtagggagggtcgttttgtgcgcgcgttttttttttattttttagggcggcgtagggtggcgggttttgtttttcgagcgtcgttcgttcggaggtttttgtttcgagggcgtggaagggagggtttcgggggcgggggaggtgcgtatttttcgcgtcgcgtattttattcgcgtttgtcgcgttgttatttttagtagtttttgcgttatgggcgggttttacgagatagttttgtatcgggcgttcggttttttcgtttcgggttttggttttttcgtttcgggtttcggttacggatttttttggtttaagatttagggttcggatttggcgtttttaagcgtttcgggtttgggagtagcgtttagattttcgtcgtcgggttttgagaattcgtttttttaggttttttattagattttttttttttttcgtattttttgtttataacgaaattttcggggcgtattgttttcgggtatttttcgattttgggtaagtttcgtcgggcggggtgcggttggtttttcggggttttttgcgtagttcggcgatgtcggttagttcgtagtagcggggtttcgtattaacggggttttttgtttttttttttttttttaggatcgttacgacgggagtagtaatgggaattcgcgggttttttatttttttttcgtcgggtagtatttttatagtttcgcgttattttttttttatattggagtcgtcgaatattagtcgttattttattttttttttttttattagtagttggtttatttttagtcggtcgatttttattcgtatttgggggaagcgtacgtcgtcgttattaattttttgtattagtcggcgtttataggtagttagtagtaggtttggttcggtcgttagagttaggagggagcggggttgttttcgtattacgggcgttcggtcggtttattgttttattttttcgggttggaggcgggcgcggtgagcgttcgtagggatgtttatcgtcgtttcgatttgttgttgttttacgtatacgttttggatgtcgcgggtttggtcgagaatttggggttttacgatatgttttattagatggacgaggtgtaggtgagcggcgttgcggtttttgatcggatttgtttattttacg

SEQ ID NO: 11143 - DNA, 6511 bp, Artificial Sequence; identical to SEQ ID NO: 11142
  Description of Artificial Sequence: Synthetic polynucleotide

SEQ ID NO: 11144 - DNA, 338 bp, Artificial Sequence
  Description of Artificial Sequence: Synthetic polynucleotide
tcgtttttcgcgtatgcgtttaggtcggttcgtaggtttttttcgttttagtcggtagttagttcgttcgcgttggggttatcgcgagtcggttcgtagcggggttatcgcgattttcggcgtagatatagaggtcgtttttagtttcgtcgtttcgtggtttcgttttcgttgtacgtttttttatttttcggatttcgtagggtcgcggcggatacggttcgatcggggacgtgaacgcgtagaattatattttttagcgtttcgttcgcgttggaattatatttttcggggggttcggcggtgtattcgtcggggtcgcggattggaggttttcg

SEQ ID NO: 11145 - DNA, 936 bp, Artificial Sequence
  Description of Artificial Sequence: Synthetic polynucleotide
gcgttttgttcgtttattgggtttttcgtcggtttatttgtatggttcgaggggggcggggttgacgtcgcgttgggaatgttttggtcgagatattgaggtagggtagagagcgtttgcgggcgtcgggcggagttgttgcggattaggattcgagtcgattttcgatttcgatttagattttaattcgcgttttcgtttcgtcgtcgtcgttatgtacgacgtagagcgcggttggagtttgtttttcgcgggttgcggttttttgggtttttattacgtcggggcgattcgttgtttgagcgagtacgtttcgtatttttttcgcgacgcgcgtatgttgttcggcgtttcggtcggggcgttgtattgcgtcggcgtttttttcggtatttcgttgggtgcgtttggggacgttgttcgggttttacgtgcggagtgggtgttttttaggtcggggagcgggggatttttaggggtcgcggggttttggaggagcgggtatcggacgcggatacggcggggtgtatttcgagggtttttttcgaggtagatgttttttgcgggggcgttgtttttgggttcgggaagggggcgttggaatttcgagcggttcgggtcgaagtttgggattttcgtgcgtttttatttttatttttattaggcgttcgtgtatgaagggagatttttattttcggattgagagtcggagcgtttcggagcgacggggagtagggagcgggattcggggcggagggtagtgttggtttttgcggatttcgggttttttgtgttttttcgggaggggttggacgggttgagttgtcgaggggtcgatttgttttgggtcggataaagagtggggttttggtcggttttttacggtgggttttttttttttggggattgagggatttaagatatttcgcgtttgcg

SEQ ID NO: 11146 - DNA, 2184 bp, Artificial Sequence
  Description of Artificial Sequence: Synthetic polynucleotide
gcgcgtttttttaatttttttgcgttttagttttttcggttttagtattttcgtgatttgagtatcggcgggtttttgtttattgtttagtattcgacgtatttgttttcgtcgcgtagtttttttttttcggtttgagtttttttttcggcgcgtattgtttttgtgatttttttttttttcggttatagatgtagttttcggttagaagttttattttttcgaggttttcgtttttgttaggtagtttttttgcggcgtcgtttatttagagttttttttttggacgtttttttagtgtttttttagtagtttcggcggttttttttttatttttagtttttttttcggttttttaggaaggggttagattttagtttagtatttagcgttttttggttttttttttttgggcgttttttcgatagttttttttagggaagttggttcgttgcgcgtttttattttcggtcgtcgtttggatagaggcgcgtaattcggagggcgtaggtttcggttcggagaagggggtgtcgtcggcgtttcgattttttaggaatggggaaatagaggtacggtggattcggcggcggggttgggtttggggttggacgttgatttaggatttcgtttttgttcgttttgcgtcgcgtttttttcgggtcggttttgatcgagtagttttacgcgggttcggggttcgtttattcgataggagcggggggttgtagtttacgagtttacgagttcgtagcgacgtattcggagtgtaatttcgtagagttacggagatattttttcggtgtgggcgtttcgtcgcgtttttttttcgcgggttgcggttattttagggtaggatagagtcgagatgttcgggtgggagcgatgttcgcgtgggggcgatgtaacgggggagatgtttggggggagggtggtaaggtgaaatttggtggagaataatgggggtgggtgggcgatttttggggaggtgttcggtgtggggtgtttttggttcgttcggggatagtgcgcgttttttcgttcgcggcgttcgttttgttcgttttatcgaggtttttcgggagcgtttgggtttacggtttcggggggttttttcgagatttgggcgttgttttgggggagtaggggttcgggttattaaggttcgtgcggatcgtggggtgttttacgtttaggtcgggggattttagagtttcgttttttttaagggcgtcgcgtttcggattgtaggtggagacggggatcggtttcgcggggtcgtcgataggcgcggggcgggatagggtgggaggcggcggggcgtagagtttttcggtcgtcggcgcgattcgggtatttttttggaggcggcgggagcgcggtcgcggcgttttcggggtggggtttaggttggaggtttcggggcgtatcgttttagttttatttcggtcgggttttcgcgttgtttttgcggagagggaggaaggaaggaaggtagggagggaggggacggtcggtaggcgtggggttcgcggcgttagggtttttttttttcgttcgttttattttgtaattcgtagttcgggcggggtttcgttgtttttttttcgaatatagtcgtttttttttttttttttaatttcgagcgttttttttttcgaatgcgggagtttatagtgtacgggaagtttttttttttttttatcgaggttgttcgacgttttttttatttttcgatttttcgtaattattttttaaatgtttcggcggttagtagggttggggtgggcgtaggagaattaggggttttgttcgtatgtaggggtttggggtcggtgtggtcgaatgaacgcgcgggtttagacgagtttgtgatgttttcgttttttattttttcgcgatttggttttagaagatagtttgagaggtcggtggtcgcggattttggacgcgttttttttttgtttgtggtttttttttatttcggtagcgttgtgagtttattttttatttataggagttatatttagaatttttttttggggttatagcgtgggttttcgatatttgtgtgattttagttttgtttttttagggttgcgtggtgaagtttttaggatttttcgcgtgggttgggcgggtgacgtggatgagggataacgtggtgaggttttcgtcgtggcg

SEQ ID NO: 11147 - DNA, 413 bp, Artificial Sequence
  Description of Artificial Sequence: Synthetic polynucleotide
tcggggcgtgggagttgcgttcgtttttttttttcggcgtttcgtggagatcgggaggtttagcgttttttttagtttttagcgtcgtttttttagattttagagacgtcggttagggcgcggcgtttcgggttattgcgggtttttttcgggcgggcgacgtggggggcgaggtatcgcgcggcggcgtttggcgggtattgttgttcgcggagggacggtgggggggttttagtagttggcgggggtggagggggcgggagagggagtttgcgtcgggttgagtttggaggtgcggggcgggttcggggagcgtttttggggttttttttgttatagtcggggcggttggaattttttttttttttttttttatttttttattttttttgttcggtttcgtcgttaggtcg

SEQ ID NO: 11148 - DNA, 403 bp, Artificial Sequence
  Description of Artificial Sequence: Synthetic polynucleotide
tcgtttagtttttgcgttcggaagaaaatttagcgtaggtcgggtttcggcgcgcggaagttttgcgaattttaaatgtgtgcgttgagtcgaggtttttaagcggtaggagagaatttgattttcgatattttttttaagatacgcgtcggtggatcgggttttgggattggtttattttcgggttggattttggggttcgtatatttgaaagcgtaaatttgaggaatgacggcggggtgatgggtattttatagagtgggatttaatcgtgtttagtaatagatttttttaaatttttttttaaaaagagttttttagagttgtcgaaattttcgcggggtgaaagttaaatttttggagtcgttgtgtagtcgggtagaggatacggcggcgcgagtcg

SEQ ID NO: 11149 - DNA, 675 bp, Artificial Sequence
  Description of Artificial Sequence: Synthetic polynucleotide
tcgtttttaaacgtacgattatttttttagttttttagtattaaatttagcggttttattcggttacgtttttacgttaggttatgatttttatatggtttattgcgtaagtttatatttagttttaggaagcgagttttacgtcgttttagttttgtatttatagtcgttaagcggtttcggaagtcgaatgtcggataggttaaagatagcgtcgttgtttcggtattgtcgttagagggcgcggagtcgtcgtgttggtttgtattttttttgttacgttagtcgaacggttacggtaatggaggattttgtcgtatgcgacgataggatgattgttttttttgaagttttattaaatacggagaggtttttttgtttttgggagacgcggtgatgtgacgtagcggttgtagcgaaggttttttgtaaaagatggtcgttgcggagttgttaggtgttttttggtaggcggcggtcgtattataagatggcggttcgttttagggttttatacgcggggttgcggaggcggcggtttcgagggttttcgttttttgttggttttgttttcgcgtgcggggttgcgatttgtttttgtgtgcgggtggaagtgcgggtcgttttggggtcgagttgtaatttcgcgatattttattggagtgcgatgagacg

SEQ ID NO: 11150 - DNA, 580 bp, Artificial Sequence
  Description of Artificial Sequence: Synthetic polynucleotide
gcggtggtcgaggacgttttttttggcgttcgggggtatcggatcgcggttcgtcgggatggaggtaggtaggtagcgtttcgggagggttttagggagcggttcggagttgttcggcggggcgtttagggcgtagcgggtagcgtttatcgagggcgcgtaggtatttttcgaaattttcgttgattaatattttttagtatttagtgaagtcgattggtatttcggggagtgattggagttagttggttataagcgggcgggacggttggagattgtcgggatagcggttgtcggtgttacgcgggtggtgggcggttcggaaatgagcgtttttcggggatagggggttttgcggggcggcgatagttggatttttagcgcgtataaagtttgcgggaggatttattgtagcggtcgttttttttcgtttagcgagggcgggcgtaggggcgggggatgtcgaagggttaggtttgtttaggtcgcgttattttcgttttagacgtttagttcgttttttttataaaggaagaggagatcggagacgggacgtttgttttgttggtcgaatttttcg

SEQ ID NO: 11151 - DNA, 858 bp, Artificial Sequence
  Description of Artificial Sequence: Synthetic polynucleotide
tcgggtacgttgagtttatcgagaattttaaggagttaacgagggcgggtgtttttatatttttttagggattagcgtcgttcgatcgtaattttggggaagatttcggcggttttggagaggagggataggtttttattatttatttggttagtttcgcggaagggttggtggatgaatgaattgttttttcgtcggtcgagtttcgcgggatagcggcggatcgcggggtgtttatttgtggggatgttcgagggttttttcgagttcgtatttagatagggattttaggggtggaggacgagcgttaggagtagtagttgaggttttatcgtgtatttttttatattcggttttcgagggtcgcgcgggtttaggcgtttacggtttcgtagcgtcgcgtttttcgcgagaacgtagagattcgggttcgttttgagtcgtcgattgcgggcgggagtcggcgggtaaggcgcgcggtcggtagtcggagcggcgcgtaacgtagttgagtgaggtcgtcggtggaggtacggagtagtaggcgttcggggcgttgcggaggttttataggtttttcgaggggaggcgacggggcgggtcgcgttttggttattggtcgtcggttgattcgtcgtcgttgcgcgttcggtgcggtcgttttagttcgtttttttgggttttacgtttggattgtttgtttagcgcggacgttatttaaggagttgtttgcggttacgtgtggaggtttacgtagcgtttttggttggaacggggaagtttgtatttagttttgggagtgggtttgggagagggaggaggagtcgtcgggagtttggcgggagggcggtgttttcg

SEQ ID NO: 11152 - DNA, 5715 bp, Artificial Sequence
  Description of Artificial Sequence: Synthetic polynucleotide
tcgggattcggtttttcgtattcgtcgtcggtgttgtcgacgtttatagcgttgatgagattttcgaggtttcgggttcggttttaggagtttttgtttttcggttgaggaagcggcggcggcggcggttgcggttggggtggtagttcgggttttttttttacgtcgatggcgatgtagttgagattattttggaagtcggtagaggtttttttgcgtatgggcgatttatcgtttttaggataatcgattaagttttcgggttgattcggggtttacggtcggttttgcggtgttaaagggggcgtcggttgtaattgtcgtggggaggtgggcggttcgtcgttttttttagggtcgatatttacgtcgttttcgttgttttttttgagagagatattttttacggaggtcgagttgtggcgtttggggttgtgggcgaaggacggggatacgggggtgatcgtcgtggtggaggagaaggtttcggaattgtggcggcggcggtttttttgcgggtttgcgcggatgattttggcgtcgcggtgggggttcgggggttggttggtttgtaggaaggtttcgattttcgatatttgttttatgaggtttagtttttttacgttcgacgtcgggttggttacgcgggtagtttttggtttcgggggggtcgcgataggttgcggcggggtggcggttatattaaaagttatttcggtgtagttattattgttttcggtgttcgaggataacgatgaggcggcgttcgggttttgggcggtggtaacggtcgaggcggggggtaggcggtatagttttttcggggtcggcggcggtggcggcggttgtagagacgacgacggggacgcggacggacgcgggggtaacggcggatacggggaggaggtttcgggggataggaggtcgtttaaggagtttacggggtggtcgttcggggcgttcggtttaggagatttgggggagttgaagtcgaggtttatgtagtcggagagcggagatcgttgtcggttgtcgttgttggtgttcggggtgtttgagtttagcgacgaggtcgggttgttggcggataagagcgaggaggacgaggtcgtcgacgttagtaggggaggcgcgggcggcgataggcgggtttcgggttcgttaaagtcgatgttgatgtattcgtcggggtttttgggtttcggtggtagtgggtattcgtgtatgttgggtaggttgggtagtttttttagggataggcgcgtgggttttatcgttcggtcgcgttggtttaagaagtttttcgggcggtcgtcgttaggtcgtacgggcgaaggtattatagggtgagggggttgcgtggggtcggtttcgaaggcgttggtcgtttggttgggttttggcgtggtttgaggttttagacgttttttttttaggatgcgttttacgggggagtttatgagtacgtattggtcgttgttttcgttataggtgtagggggttttgtaggagcggggtaaggagttgtagtagtagtcgggaacgtttttgagcggtttttcgtcggggtgtagggttgcggagaagaagtcgggcggggtgttcgtggtgatcgcgtcgttgggggatacgttgaggtagttttcgttgggtagtagtttgttatttgtatgttttatggatagtttggaatcgtattatatgcgtatgtatttattgttttcgggggagttttcggcgggcgagttggttttgtagtcgttttcgttcgtcgggaatgttttgttcgtcgtagaggtgggtgttggtttcgtaggtttcgtagaaggtacggcggcggcggcggcggcggcggttttgggttgtaagatttgtttgggggcggatacgttggcggggtttatgggtatgtagtcgtcgtttttgtagttgtcgtttttattgttcgcgagggtcgcgtcgggcgttatgggtatgtagtcgtcgtttgtttttaggttgttgttggagtttttgtgggagtcgatttcgatgttttcgtagttttttgggtaggggtggtaggttattttgggagaggacgcggggtaggacgggtagaggcggttcgcgttgttcgagaaggtggttcgtattagggtgtatttatttagcgaggtagaggagggttggggtatcggtcgttgtcgggttggcgtggttagggagtaggtttttttgcgtagttttcggtttaggttttgggtcgcgtttttcgagattcggcggtaggagcggttatagtggtttaggggtttgtttatggttatgtattcgtagaatttatcgtcgtcgtcgtcgtttcgggtcgggggcgttttcgcgatggattcgggcgtgttgtttcggtggttgtagaaggcgcgtaggtcgtttgggttggagtcgtattcgtttagggatatgaagtcggggtcgttgggggagttcgaggcggaggcgttgtcgttggagggtcgttggtcggggtcgtggtgtagcggatgcggtagaggcgggtgcgggtcgggcggcggcgggtaggagttcgagtcgtggtcgttgttggacgatagggagtcggggttggtggcggcgggcggcgagtgcgttacgggtatggatatggagcggttgtgttgtagcgcgttttttgtcggtagtagcgttattttgttttcgcggtcgtcgtagtcgtcgtttagggtgtgcgagcggtttaggggcgcgcgtatcggttcggggtttagggggtttttagttatcgatatcggtttggcgttcgcggtcgtcgttttcgtcgtcgcgtcgtcgtcgttttcgttggcggtgcgtattcggtacgagttgtatttggtcgtcggcggggtggcggttaggttgtcggtgcgcgagcggcgtattaggttcgtttggttggggggtaggttgattaggtggtggtggcggcgcgcgtcggggacgttgatggggtgcgtggtcgacgatttcgacgattggtttttattgcgcggtcggaattcgaagagttttttgagcgtttttatggtttttaggatggtttcgtggatgttttgcgttattatcgagtcgttcgtttgtatttatagttcgtcggggtttgtgacggtcgagcggtttatttcgatgaagaagaagttgttcgagtggtcgtagcggcggatgtttatgagttgtagcgttatcgacggttgttcgtagttgagttttacgaagtcgatggtgcgcgtagataggtatagacggtatattttcgttaggtttttgttttggtttagatttttgggttttaggtttatttgttatattttacggtaggcggtcgtggcgggagttattagttcgtagttgttttcggtttcggcggcgtcggtagagtcgtttagggcgtcgggtagggaggcgttgtaggacgcggcgggcgcggcggcggggggcgcgttttcggcggtcgcgcggttttcgttgattaggtcggtgagcgcgcggtattagtttttttgtttttgttcgttttcggcggttacggcgaagtattcgtttttggtgtagagggcgattaggtatttgtgtttggcgtcggcgcgtttgttgatgtttaggtagtagtcgagagcgattattcgtttcggcgcgtttgttttgtttcgttattttttttcgttttcgtagtattcgagtcgcggcggttgcggcgtcgatttttcgttcgtcgtcgtttcgtcgtcgttcgcgtcgggttcgcgtagtacgaagaagcgtttgtggttatgtttttgtttgcgtaggtagtcgtatttgcgtacgttgtggttgttgttgttgttgttgttgttgaggttggggtcgttttcgttcgtcggttcgggcggttcgtgtcgcggcgggttcgttatcgcgggcgttttaggtcgcgcggttcgggttcggcgtttaggggttggggcgaggggcggagggggcgcgggcgggggcggtttttttttatttttgcgttcggtcgttcgttcgattacgcgtttttcgggtttaggcggtggggaaggttcggggaggttcgcgggggttagtatcgttcggcggcgtcgcgtttttcgcgttttggggtttttgaggatgttcggcgcgggcggtggtcgttttttttttcggttgtttgcggtcgttgttttttcgggttttcgggcggcgtcgggggacgcgttcgttgggtcgggagtcggggttttcgagtcgcggggtcgagtttaaggcgcgcgcggtcgtatcggggttgttgtcgtcgcgtcgcgtttcgggaagtcggggtgcgttcgggcgttcggggttcgcgtcgtcgtcggggttgttgttgttgttggtgttgttgttgttgttgttaacggcgattcgggttcgtcgcggttttcgtcgtatagtgagtaatatatcgcgtatcgagtgattgaattaagaagagtaaaataatatgtgattcggcgttacgtaggtatatatagcgcggtcgtttcgtttcgttgtttcgtattggcgtcgcgtttttcgacggacggcgcgttcggttaatcggcgcggcgttcgcgggggcgggtcgcgcgttttcgtttcgttttttttttttttcgggtcgcgtttttcgtcgttttttttttttttcgcgaaggtttcggttcggtcgggcggggtggggcggtttcggttttattaattagcggtttgttgtggatgtcggcggaggagatgttatttagggcgggaaaaggggcgcggaagaggggcggggcgggttacggcgcgtagggtttttttttttcgtttcggatttaattaattgggtttgagtttttgtcggggagggggcgtcgggcggggtcgcggttgggcggggcgggggatcgggatcggcggcgggggttgcggttttgtagtggaagtatgggcggcgagtcgggtcgtgttttcggggcgcggggtttttattttgggcgagggcggtcgttttcgcgttcggggtgggcgcgttttattttcgtttttcgtttttcgttttcgtttttcggtcgtattttcgttttttcgtagtcgcgaaacgcggggaggttttagggttcgcggtcgcgggttcgcgagtatcgcgttttagatcgagagcggcgcgcgttttttcgtggaggatagaggggcgcggagggggcgtttgtgttttattcgttcgcgggcgttttacggggcgttttttgcgttatttatttgttagtttgtcgggaagttgaaatcgcgtttgggaggtaataggagaaagagatcggggacggtaggcggagaaagtgcggtttttatagcgtcggggagagggcggattcgcgagttagcggtttttgagtcgggagatcgcgcgggcgtttttttagttttcgtaggagcgtcgtttttttttcgtaggggcgttttttttttttatcgttgtaggagtattttttttttttttcggaagcgtttttttattatatcgttttaagagtttttttttttttttataggggcgtttttttttttttcgaggtaggagcgttttttttttttttataggagcgttttttttattttaggagcgttttgcgtttagtagacgggtaggtgggcgggcgtttattatttgtgtgcgcggtgcgggcg

SEQ ID NO: 11153 - DNA, 858 bp, Artificial Sequence; identical to SEQ ID NO: 11151
  Description of Artificial Sequence: Synthetic polynucleotide

SEQ ID NO: 11154 - DNA, 247 bp, Artificial Sequence
  Description of Artificial Sequence: Synthetic polynucleotide
tcggaattttcggggaggattaacgtcggcgtatcgtgcggtcggggcggggcgtcgtttaaatttaggttttgtgatagcgattgtggcggtttggaaagcgtgggtttcggttattgggtacgagcggttacgtgatagcgggtttttttaggttagcgttggtggttgagtgatgtaattacgtggggtttgaagttttcgtgggtgtaggttttttcgttatgttgacgataggtagtgttcg

SEQ ID NO: 11155 - DNA, 224 bp, Artificial Sequence
  Description of Artificial Sequence: Synthetic polynucleotide
acgttcgtttttttttcgggtagttttttttatttaggcgggatttgggttttcgttggatttagggtcgttttttcgtaggcggggtcggttcggcgcgtattttgtttcggatgttttggcgtacggtttcgcgtttcgtttttattttggcgtatttggttttgcgtttttttttcgtttggcgtagcgttttttgtcgtttttttttttttttggcggcg

SEQ ID NO: 11156 - DNA, 1174 bp, Artificial Sequence
  Description of Artificial Sequence: Synthetic polynucleotide
gcggcgaattaaagagtagggaattataaaagacggtcggcggcgagtaggttggggtgacggggatttcgtggataacgggtttgaggacgtttagggttttagttttttttaggcgtttttcgtcggggtaacgtagagtagttgtcgtttttttcgcgttttagtagatggtggtgttagttcggtttcgtgttcggtcgtcgttgcgttcgcgtttttttttttcgtagatggtttaattagggttttcgttcgttttttcgcggttttcgtttcgcgcgtttgggcgagcgttgcgaacgtggagttaggtagttaagtgttattgcgtatagtaggtagtttggtaattgagagtataatatcgagtagatggtgttcgtacggcgtgatggatattatatacgatagtttgagataatttaggaattttttggtgattcgaggttttttttgtataaaatgagttttttttttattgtcgtgtatttttggggttatttgtttttttttttcgattgatattgaattggttttttattatcgattttttttttagtcggaggggaggaagaatttaagtgggggagggcgcgggaaggggacgtggagggaaacggaagggttgggagtggggtaggggggtagtggcgattttcggggggggagggtggcggatattagattttagggtcgatagttcgggagggatcgggttttaggattttagttgtataaagtcggttcggggagggggcgataaggagcgagtttcgggtcggttcggtatcgttgtttcggtttagagtttttgtaatcgtttggtttacgaataatttaaatgaaatttagggttttattgaaaaagttttttggggtttaatttagtttttcgattttagtttatatgtttataagtttttaggggatttcggttaggaagttaggagtggggttcgtgcgttttcggtaggatttagattgtttttcggcgtaggcggttttaataaagaagtttacgaggcggtttcgggcgcgggtaggggcggtgcggcggcgttcgggagattcgcgaggggttttggaggttttcggttcgcgcgcgtcgttcgggagttcgcgaggttgcggtgtgttttagcgggcgtattttttaggtttcgttatatcg

SEQ ID NO: 11157 - DNA, 8657 bp, Artificial Sequence
  Description of Artificial Sequence: Synthetic polynucleotide
tcggattttttttcgggtttttcgggcgtttcgttttttcggggttggtttttttttttttttcgggcgtcgtcggtcgcgggtcgtttattttttttgggttcgtagtcgtcgttcggggatcggtagtgggattcgagcgggtgcgcgttcgttttgttcgcgtcgttggtcgtttttggcgcggtgtgtagggtttcgtcgggggtcgcggtcgtagagttgtatcgtaggagattttggttttgtagcgtcgcgtttaagttttcgtagtttgtgtagttgtcgtagaagggcgacgtgtagtagagggggcggtttagtagcggcgaggtagggtagggcgagttttttggcggtgtttcggttgaggtcggcgcggcggtcgcgggtagtttcggtggttcgtagttcgggtttaggttcggttgtttgaggttcgacgtggcgatttcggttagcgattatagtttgggtttgttggcggggggcggcgcgttcggagacgttcggttgttttggggcgttttgcggttatcgcggggcgcggtttcgggcggggggtttagtagcggcgtttttaagtcggtaagcggcgacgaggttacgggtttgggcggcgttaggtttcgttcgtttttttcgtcgtcgttttcgtcgttttttaggtcgttatatttgtttttgtatttcgagttcgattcgtatagggggttttcggcgcggtacggaagttttttttcgttcgattcggtcgagtacgagtgattcgtgagcgagtttacgtgtaggttgatttttgtgggggcgcgggtacggtgggtggtacgaggggatagcgtaggtatttggagtttttttcgttttttgttttgcggtattgggttttttttacgggattttttatttcgtttttattcggttacgtgataggcggagtttgattttttcgggaagggttcgaggaatcgttcgtttaaatttcggcgattttagggtaatgtggtgcggttggggtttcggttcggatttggggtgttcggcgggtaacgtttttttcgttttagttttgcgtttcgtttgggaagaaagcgtttcgagattttgcgtcggtcgttgttcgtttattttcgttttttgtcgaggttttcgtgtttttttgcgttttgtcgggattttcgtttttgtttttggtagcgtcgttttcgttttcgtttttattttcgtttttgtttttcggggtttaggttattttgtttttttttttgaggcgtcggcgcgcgttggcgaattaggtggagatttgggtgagggttattttggtgatgatggttagtatgattttttcgtttttggtggggtaggggtttttgcggtgttcgttgagttaggttttgagagtggtcgtggcgtttcgcgtggcgtttttgcggtacgcggggtcgttgagttggtacgggtaggtcgcgttgtcgtacgggtggtagttgatggcgtcggttatgtcggtggtgtgcgcgtcgtagggtgcgttttggaattaataagagtttgtgagtggagtatgcggagatttcgcgggtaattagttagaggatgttattttttcgttcgtttacggttatcgtttttttcgtgagtttggttttggggttgcgtttttcgtcgtaaaagagtaggaaaaacgtagtgtgattcgggattagttgttgattataaaaagtatcggagttttattttcgaatttttgaattattttatttttttaaaatgatttatttttttttaagtgtttcggagtcgttcgtggtaatgtatataaatttttgtacgtgcgcgtatataggtttataggtagttttttgatatttaaatttttgtagatgtttggagtgcggttgtttttttttatttttttttttttttttttatatggttaaaaaaatattttagagtttttaatttattatttattgttttaaagttgggtaaatttaatttgtaatttagaagttagttatcgtttcgaattttttaaatacgtcgtaattagtattttaatttattttttaacgtttaaattcgaggtatttgtagttttcgttaaggttttagcgattcggtcgttgtttagaaatttcgtcgagggtcggtagtcgcgataatttcgtaatggttttaatcgttcgtaacgtgtttcgtcgcggttcgggtttggtttagtttagtaatttcgagattcgcgagtcgtttttaggtcgtcggagtaggagttgcgttcgggttacggaggatttaggcggtttttagcgggttacgcgttcgtaagtacgatatttgaaagtatggttcgttggatagagtaaggtcgaaatttgggcgtttcgggtcggatttcggagtcgtagttgaatgttcggtttttgggtttaattcggtgatttttatcgttttgagtttcgcgagtgaatgcgaatcgttcggtcgtcggtttagaggtcgtagtgacgcggattttcgcgttttacgttaatgtaggcgagtatatagttcgtttcgaacgtttttttaggttgcggtgcggaaattagggataaacggcgttagatttcggtttcggcggagacgtattttttaggtttttagagaaaattagtcggcgagtcgaggggacgcgcggggggcgcgcgggtttcggtcgggtttagggacgttttcgtttgtcgcgttgttttttttattcggggttcggtttagtttgcggggcggttaatcgagtcggcgatttttgagtcgttagtcgcgttatattttcggcggttttcgttcgtcgaattcgagtttcgtttcgtttgagtttcgtttgggtttcggcgtttaggagtttcgcgtttcgttcgcgttcggttattatgtaggacgggaagtcggcggcggcggcggcggcgtcggtcgagtattgtagcgggttttcgaagtcggtggtcgtttgcgtcgtgaaggtcgtcgagttcgggtaggggttgaacgtcgagttcgacgtcgagcgcgttagtttttcgttgcgcggagtcgttaaagtcgacgcgtcgtaggtcgggtacgagtagagcgttagcgagtcgggcgtttggtataggtagttttgcgggtaggatatggtgggcgcggggcgcggggttcgcgttacgtcgagtagcgggtagggcgcgcggcgttttttatttacgttcggtcggggcgcggcgcggcggcgggtattcggacggtcggcggaggtaggtcggttcgggtattagtttgggcggttcgcgggtcggggcggcggcggggtggcggtggcggcggtagtagcgcggagtcggtgggcgtagtcgcgcgttaggtcggcggtcggggtttgggggagtttggagtcgggagtgaggagttgaggaaggagcgttcgagttttcgagggatattggaacgcgtagttgtttattacgcgtttatttgtatattcgggggttcgttttttttttgtttcgttcgttgtagttttcgggtcgcggttgggggaggggtagagagacgggagggaggcgggggagggcggaggcgacggaggcgggcggcgggagggatcggtaggtttttgtggcgtagtcgtttttttagtagtttcggttttagttcgcggttcgcggatttgtagtttagttcggtcgcgttgcgtgtttcggcgcgtattttttttatttttatttattcggagttacgttttttgttcggtttcggtcggtttttatcgttttcggttatcgttttcgtttttgttcggttttcgttttttttagttattatttcgtttttatttttttttttatttttatggattaggtagaggtcgttcgcggttaggttaggtcgggtttaattaggggatttatagtttgtttcgttgtgtatttcgaggaggttcggtttttgtgtttaattcggaagtcgtagggaagtggggaggttaggatggtggcgttcgcggttcgggttttttttcgggtagtgcgcgcggtttttatttttacggtttcggatttgttttgttttttggttcgaggtttttcgcgtggtttcgcgtttggtcgtttatttttcgcggtttatttcgtttagtatggatttggattcggggcgttttggttgcgaattgttaggagggttttgaggtgagttttttgtttttaaattcgtagcgtaattttcggggttttgaacgttacgattttttattgttgggaatgacgttagggttttagttaagaagacgtcgttttttaaagagttttattttattttgtttttttaagttgattttttttttagatttgtgttgttaaaatattggggggatgattgttatttgataaatcgtttttggtaggatttgaagttttttagttacgtcgagaacgggtaggagtttaggttggcgtcgtcggtgtagtgggtattataggtagtttaggtgacgcgcggttggagtaggggggcggttgttttgcggggtttagaagcgaggcggttggcgagggtttttaggattttagttttttagaattttttttttattacgtttttttaatttttttttattcggggatggtcgaagagggcgtttggttgtttatttcgaagggttatttatggggggcgtttagggggatggaagagtgttaggtttgtgttggtttattgggagtatttatttagtaggtgtttttattttcggaagtcgtttcgggtgggtgcggtggagaagagagagcgtagtggtttggggcgggttttagtttaggtttgtagtcgatttttgtatttttgttggttttgtagtttgcggagtagttttagtgattttaggacgtagggtatgttgcggtttttttgtggtgcggttgtagcggcgcggagggagcggagttcgggttgttagtttggtttagggcgtaagagaaatatttacggtattaggttgtttttttttaggtgtaagggaattagttgtaaattgtagtgttgtgtttgaggatggttttttttgagtcggtaggttttcggtaggcgcggtttaggtacgttatttttttcgttaggagttttcgagtcgagttattcgttttttattagttattttatttattttttcgtttatattgtttttttattattttttttataaattatatttttattttgtatatattttttttaggttattttaatatacgtatacgtatatatatttacgattatttttttttttatttatagatatttcgtttttataggttgggttttttgtaacgatttagcggggggttttaattttgttgcgattttatatgggatattttaatttagtttaggatagatatttttaattaattattatagagttgaaaaatagagagagagagaaagtagtcgggttgggtaagtcgtcgatagtttgcgatatttttgcgttttttgggagggaatttttttaagaagaggggtaaatgagaggtttatacgttggatggtaaatataaatattgttagattagatggtaatttttagggtttttttacgattagattagtttaaatgaaaaaaaaatcgggtgtaatttttattattagggagtattggtttggagtatttttatttttaaagagcggttttcgttgtggttttattagtatttggggtttatttttttttttttttttttgatttattttttttttttcgtcggatttttgttaggggtagaagagaaaatagttagttattatataaatatttttagtttggagttggagtgtttgttttggatatagtcgattttgatattaattaaatatataattagatacgtgtagtggcggggagggtttttttatttagggtgtatttttagaaacgtcgtttgtttttttttttttttagtttagtgttgggagtttgaagatggttttttttcgttttgtgtgtattttttttttagtaattatatttttttattgaaatttatatgttttatatcgttgttgtttgttattaataaaaatcgtttattttgtattattaaatagtcgatttttattatatgtcgtttttattggtagtgattgtagtaaattaaaatgtttacgtagggatattaaaaatttaatattcgttattgttattgaaatatataaattacgttttgttttaaagttttttgatattaaagaaaaaaattatattttttttttttaagttaaagttggtttggttttttttttaaaaaaaaaaaaaattaattatgagaaaatatgttgttagcgtggagttttggcgcggcggtttcggcgaggttgtttgagagggtggcgggtttagtttagatttcgtttcggggttacgagggttgtaaggtcgcggttttcgaagaggagggtttgggatgttttgtttaagggcgaggcggggtgtttaggtttgtggggtcgttggggagagttcggtatttggtttttgaggttttttagttgtcgttcgagtaggagggagggaatgagtaggtacgtagggaaaatttagtaattgttttgtaaacgcgatttttggttataataatttaggcgatgggggtagttttaggtttttggtgggttttgtttttttttttaggtgtgttttaggaggtggggaaaaaattaatattgtttttatttttttttattgtttttgtaatagttaaagaatttagaacgagtttacgtggatacgtaagttttagcgagcggggattttttgcgaggtcgagcgcgaggaatagtcggtttcggaggttcgggttcggggttttttcggggacgcggtcgattgagaaggtcggggcgttcgtcgggcgcggcgtcgtttttcgtgtcgcggggacggaaggaggcgacgtaggttaggagtcgtgcgcgcgggcggcgagggggcgttgtggttcgtgtttgtcggttcgagtttcggtaacggtgggcgcgatttattttttttttcggcggtttaattcggggaagaagaaaaaacggtatcgaggtattttaataaaatttaagcgatttttgatttttttttattgtggttttttatgagttttcggtgtttggcggggaaatagttatcgttcgggggtgtggtaaatttttttggtaattaagatgaaatagacgtttttatgtgggttttttttaatgaagtaatattggaaatgtaagtagttttagtgtattaaattatatcgttatcgtattcgcggttatcggttttttcgttttagggtttttcgcgtttgtcgagggagagagcgaggtaggaatagggggtcggggatatgagaagtttggttaagaaattttttttttttttgaaaataaaagcgttgttataaatggaataaaatttaagttaatatggaatttatattttttttaaacgtcgtttttaggtttagtattttgtgagtaggttggattggattttacgtttaatcggtatttttaggtttttaaagacgttttcgaggtttaaatgtttttttggaaaatacgtgtagaggagtattcgtggaagattgaaaggttttcgtagttttagttttggtaggatgtgtaaggtttttcgaggtttttaaatgggttttcgaggtttgggagattttcgagtagttacgcgggcgttattttagggacgcggggcggcggttattgtgggtcgggagggttttcgtacgggttgttttgagcgtttggattcgggattttgcgcgcgtttttttttttttttttcgttttttttttttttatttataatttatattttagggatttcgtatttagttaattagtttttgtttatttaattgttttgtttttagtttcggatttttgggaggtttttttatggttaatttgtttttttcggtattttttagcgttttgtaaaatttgttttttttttatagatgtttcgttttcgacgtgttttttgaagtttttttttcgtttagggtgtttataattttgaattttttagtatttcgtcgatttcgtttttattttttttttttttttaatttcgcgttggtttcgttttttttttttttttttttttttttacgcgtttcgttttttttttttaggtcgtattttttttcgttcgggtcgggagtttttcgtggttaggcgttcgcgcggtttaagatcgaggttcgttacgttgggtcgttcgtgggcggtttttattcggtatatcgtggaaacggcgcgtttcgttagttgcggttttagtttgggagggagcgtagcgcggggagtttgtagcgtttggagagtgaggaaaagggatattttttggaaatggatagagtcgagttttttaaagggatcgtagttgaaagagattttttttaaaattagtaacgatttggtagttttagttttttaataggagatggttcgaagatgaaatgtttgaaatttcgtcgtcgttttatttttgtatatacgcgtacggtaggtttagattcgtatagagacgtagatacgcgcgcgttcgcgtttttcggagaggtcggcgcgtttcg

SEQ ID NO: 11158 - DNA, 1059 bp, Artificial Sequence
  Description of Artificial Sequence: Synthetic polynucleotide
tcggtttgttatcgttttttagggaacgagatattgttgagttggaagatttcgcgggttataggtatagtttttttgttgttggcggcgttgttggggttgtttggtaacggtttcgtggtgtggagtttggcgggttggcggtttgtacgggggcgatcgttggcggttacgtttgtgttgtatttggcgttggtcgacggcgcggtgttgttgtttacgtcgttttttgtggtttttttgattcggtaggtttggtcgttgggttaggcgggttgtaaggcggtgtattacgtgtgcgcgtttagtatgtacgttagcgtgttgtttatcggtttgtttagtttgtagcgttgtttcgtagttattcgtttttttttggcgtttcggttgcgtagttcggttttggttcgtcgtttgttgttggcggtttggttggtcgttttgttgttcgtcgtttcggtcgtcgtttatcgttatttgtggagggatcgcgtatgttagttgtgttattcgtcgtcggtttacgtcgtcgtttatttgagtttggagattttgatcgttttcgtgttttttttcgggttgatgttcggttgttatagcgtgacgttggtacggttgcggggcgttcgttggggtttcgggcggtacggggcgcgggtgggtcggttggtgagcgttatcgtgtttgttttcggtttgttttgggttttttattacgtagttaattttttgtaggcggtcgtagcgttggttttatcggaaggggttttggcgaagttgggcggagtcggttaggcggcgcgagcgggaattacggttttggttttttttagttttagcgttaattcggtgttttacgtttttatcgttggagatttgttgtttcgggtaggttttcgtttttttacgcggtttttcgaaggttttggggaggttcgagggggcggtcgttttagggaagggattatggagtttcgaattattttttagttgaaagtggtggggtagggtcgcggtaatggagattcggggggtgggatggagaaggacggttcg

SEQ ID NO: 11159 - DNA, 1663 bp, Artificial Sequence
  Description of Artificial Sequence: Synthetic polynucleotide
tcgtttttcggttttcgtttttcgtttttcgggtggtgaacgtttgaagagggaggcgtggtttcgcgtattttgttttcggtcgcgttatcggtatttatttggttgttgtcgtgtttttcgttcgttttcggggttcgagatttcgcgggatttcgcgtcggttttgcgggaggaggcggcggttttagtagttgttttaggtaggcggtgttcggtagagaggagtttttttggtggtataagtgcgtttcggggttttgacgtcgtgtatttttatttcgggcgcggttttttttcgggggaggttggggtgaggaggatagggaggatgaggcggaggaagaggaaggagttgagtcgggggagcgttcgttaggaggcgtttttttcgttgttttcgaggtcgtcgcgggtttttttacggcggggagtaaatgttcgcggattcggcggcgtagcgtggatttttgttcggttttgtcggcgtcgtcgggttttaggggtttcggcgacgagtagtataggttgggttgcgaggaggagaagattcggtttagtatttgttttcgttttttgaagtcgttttatttgttgtttgtattattttttttggtcggtgtattttttgtgtttatcgggggtggcggggagggcgacggggtgttcgtagtgcggcgttttggatttttagcgcgttcgttttcgtcgtttttgtttttgtttatttttagttgtaggtttttttagagtcgggtttggaaggaggaggacgtcgtcggcggttttggttcgttcgtcgcggtagttcggggttttattttttattttttgttttttttttttttttttttttttttttttttttttgtttttttttttttttcggttgtattttttttcgggtttttgcggcgttggcggtggcggcggcggcggcggcgggcgtagtagtagaaatcgggagtgtttagcgattttaggttagttcgggggaaagaagcggtcgtcgtcgtcgaggttttttggtttcgggatttcggcgttgtttttttttttcgtatttgttggggtgggttggagtcgtaatcgaatttcggtcgcggcgtttgtaaagtttttttttcgaagtttcgcggttttagtttattggcgttttttaggtcgcgttttggtttttttttttttttgatcgagttcgggaagttgtacgtatcggggcgtgcgcgtttagttgcgttagggatcgtattcggcgttttttgggtagtatttgttagcggcgggggcggttgtttttaaattgggcgcgtacgcggtttatataataaggcgcgtttggttggagatttcggggattagtagtttttttggggcgtttcgggattattttttagtttttaggtgggagggtcggtaggagtcgggtggagttaggtagggttcgaagttagtttgttttttaggattcggttatagttgtttaggtagttcgttgtgcgttggtcgttggtcgcgttggcgatcgtttgggtcggatgaagcgagttggagtggaaattatgtgttttcgatgggtttcgtgggggcgtcgatcgtttatattgagcgatgaattcgacggagttttaaagttgaagacgtttgttttcgtttcgttgcg

SEQ ID NO: 11160 - DNA, 2065 bp, Artificial Sequence
  Description of Artificial Sequence: Synthetic polynucleotide
gcggatcgcggcgtttttagggaatatatttatttagtaatcgagattagagttggagcgttgcgtttttaattttggggcgggcggggggcggcgggaatttttgtttcggttttttttgtatcgcgggggtagttgttatttgtaaggcgagcgcggcgcgggggatggaagtaggcgtttattggatagaatataaaggtagaaatttatttcgaaggtcggggttcggcggggcgttgggggtgggcgtttttcgcggttttcggcgtttttcgtttcgagacgtttcggtttagcggtattggcgcgatcgaggtttagtttcggggatacgttcggttggtcgcggggaaggtattaggtgagcgcggtcgcgtttttcggaatttcgttttcgcgcgtttcgcggcgacgcggcgtttattcgtttcgggagttaggaatttagggttttattatggcgttggtcgtcgtcgtcgtcgttgcggttgtcggggtgagttaggcggcggtgttgggttttttgtaggagtacggcgggaaggtgcgtaatttcgagttgttgagtcgttttaagtcgttgttcgatgtcggcgattcgcggggtcgcgtcgttcgtagggatcgttttaagtagttcgttaataacgtggcggtggtgaaggagttcgacggcgttaagttcgtggtgttgaggaagaagtttcggttttcggagttcgagttcgtatttttcggtttttcgggggtagcggtttagtcgtcgaaatttatttcgacggttttgtcgcggagcgtttttgtttcgggagtttcgtttttggttcgggtgtcgcggttagtggagtcgttaggggatttgggtttgttaatagagttataggatatttcgggggggtcggttttcgagttcgtttagtcgttcggggagcggttcgtcgatttatcgtttttagtttttgagttagtttaggttatcgagagatttttcgtagacgcggttttatcgtttagggttttttttgaggcggtatcgttttgttttgattcgttagacgcggagttcgggttcggggtagcgaaagggtcgtcgtagtagaagttttgtatgttgtcggtgcgttgcgtttcggttttcgttacgtttcgttttcgggcggaggagttcggtttgcgtcggtagttgtcggaggagtcgagttcgcggagtttttttttgttgttgaggcggttttcggtggaagagttcggtttgggtttcggtttgggttcgggtcgtttttcgtatttgaggcgtttgtcgcgcgtcggttcgcgtttgttgagttttgacgtcgaggagttgttcgtcgcgtcgtcgtcgttcgcggtgtttttggagtcgttcgagtacgagtggttcgtgcggattgtcgggggtcgttggatttattagttgtacgggttgttgttgcgcgatcgcggtttggcggttaagcgcgattttatgtttggttttacggttttgtattgggtcgttaagagcggcgacggcgagatggcgttgtagttggtggaggtcgcgcggcgtagtggcgtattagtcgacgtgaacgtacgtttttacggcggttatacgtcgttgtatttggttgtattgtacggttacgaggacgttgtcgtgttgttggtggtgcgtttgggtgtttaggtgtacgtgcgtgattatagcgggcgtcgcgtttattagtatttgcggttcggtttttcgtacgcgttgcgtcgtttttttggcgatttaggtttgcgaggtattacggagttagatgcgatcggtggtggaagtggtagttttgttgttaggcgtttcgtataggtggtcgttattatttttagttttattattagtgtatttttgggcgttttggttgacgattttatgttttaggatttggttcgaggtttgaagaagtcgagtttttttagtaagtttttgagcgtttcgtttatggttttacgtaaaaagataaagattcgcggtggtttgttagtttttttagaaatttttcgtcgatttatttcg

SEQ ID NO: 11161 - DNA, 3487 bp, Artificial Sequence
  Description of Artificial Sequence: Synthetic polynucleotide
tcgagagaaggtgagttcggcgggcgtagcgggttgggtgggtgtggttcgcggtttcgggaatagatttaaggtttcgttatcgtcggttagtagttcgatagttcgttcgtttggcgagcgtaggttttttttttagaaattgcgaggattcgagcgtattgtttgtgtattataaggttaagtcgggaagtggagtcggaggaggaggggcgaggaggcgaagggtggggagaggggcgtttcgttttttcgttatgtgttagtttttggaagttatttttcggtttttaatttttcggggtaatgggaaggaagagtaaggaggaaggggtcgtttcggggtaaaattttgttggggttaggatgtgtaattatttatttattcgtttattattgttttttttatttttcggaaatgcggggtagcgttaggcgttaggaggtattcgggaggggggagggggcgacgagtttaatggggattttttttacggatcgtttttttttttttgaggtcgtttataattttaagttttttcgttcggaatgttagttttttatttggagtgggtgcggggaggagggtcgcgttttttttttaagattcgcgttcgtttttttattttttttttgttagtattttttgtttatttttggtgttgtaaaacgttacgtaatttattcgattcgtattttaaaattagcgatttagaagtagggtttagggcgagggttttttagcgttggagtttcggggggcggggtgtttagtgtaaatttcgtttttttcgcgagtgtcgtttttaggttgttatttgtaaagaaacgtttttttgacgtagggagaaatggtaaattttaagtacgttattaatatggcgttaaaagatttttttaagtataagttcgtttttttttttttttaaggttgcggggggcgtcgttcgggtttggggcgcgtagggggcggggtgtgagtagaaagtgtgagtgaaagagtggaggggcggggtatgtgtgtgagtgtgtgaagtgtgagtagatttgatgggatttgtacgggcgtagtcgtcgttcgggttcggttttggggatagggcgggttaggggcgttttagagtttatggggagttcgggtttagggtgttagtaggcgtggtggtggggttgcgagggagggtattttttttttacggggttcgtaacgttatttggatttttcgtcggagttaaataattgggcggggggttgggggggcggcgacgggggtgtcgggagcggagattcgagtgaataagaaaaaagtggttattttttttttttcgttttttttgttcgtttttattttatttttattttaatatattttttttttttaaagagattataaggaagttttggtttaaaaagaaatagaaatatatatagggggttggtgaatggtgtcgatcgcggttatcgtagttggaggttattttttggggggggtgagtagcgtttatggagttattttgcgtttatttttagcggtatcggtttaggttttgcgggtcgatcgttttcggcggggggcgtggggtttgggacgtcgcgggttcggtcgtttttttcgtcgcgatttcggatggatgcgcgtttttcgttttttcgcgtcggttttaggagttttcggtttcgggagtatttttttcgcgtcggtttttgtagcggcgcgtagtcgagggtagcgttcgttaggggggtatcgcggagtaaggtaagatttagttttcggcggatgggttttgcgtatttttacgacgttatttggcgtttttgtaatagatttgttagcgtttttcgttttttcgtttttttttgttcgttcgtttttttttttttttgttggttgtttgttttaggaagttagcgcggagaggggggggatgtatagtataggggagagagattgcgtatgttggttagtcgtgttttaaagagtatagtgcggggaggttgagaggggcgtatgtaataataatttttggaagggtgagtttggcgattttttttattaatgattgcggtaaagcgttttcgggtcggcgagggggcgcgggcgggcgggggcgcgttagggttgtaattttttcgcgggtttcggtcgggcgtaggggttgcggcgggagatgggtacggtggggaggtcgagcggttcgggcgggggtttcgagaatttggagttatttgtttttttgttttttcgagttttattttgttgatacgtagtacgttcgggcgtcgaatcgggttgagtcggtgtatatgatttcgcgttgggtttacgtgtagtcggttcggttttagatatttttcgggggttatcgttttcgttttgtcgttttttttttcggttcggtgtacgcgggcgttgtacgcgggggtagtatgttcggtttttggggttggaggttttgtataaattagatagtttttttggaggggcgggggatattttttttaggtgagtgtggagggtgcggagtttcggcgttaggggtgaggattggggtcgggggtagtttttattttcggggtcgcgcggtagtttagttggggagaggcgttgggagagtggaaatgtatcggcggcggtcggagcggcgggtgcgcgttcgcggggcgacggtagggggcgtggtttttgtttatttttttttaattttgtcggttcgcgtttcgttttagggacggattcgtagtttttagttttttgtttagggttttgtattatgggtggtattaggaagatgtcggtttgtggcggatttcgtttgggacgtatatatttgatttttaaatgagtgatattgtagttttcgtttttatttagcgttgttgtagtttttttgtcggattttcggtttcgtttcgttttcggtagtggtattttttcggttttatttttttttttttttttttttttttttttttatttattcgtttgcgtttgcggagcggcgttcgttcgtttttttttcgtttgggtgtagatttgtggttttttatggttttttttcgtttatttttgggttttgagatatttttttttttcggttaagggacgagaggggttaatttggcgattcgtagttgttttgttagaggatggggttgtttgcgagatagttaggaaggttttattttagtttttagaggtttagttttgttttttattatatatagttattattttattcgtttttggggttcggttgtttttttcggtgttttttaaatttttttttcgatttgggtgttaagtttatttatttttcggcgtcgttttcggtcgaatagttttttgtttttttttcgtttgggtcggagtttttcgtagtttttttcggttttttttttcggtttcggcggtcggaattacgtcggcgcgtttttagtttgcggtttcgcggattgtttttaggggcgggttggaggcgcgcg

SEQ ID NO: 11162 - DNA, 847 bp, Artificial Sequence
  Description of Artificial Sequence: Synthetic polynucleotide
tcgaggggaaaggacggatttggcgtttggggttttttcggtgggatttaggtgggtggttcgcgtggggtggggtaggggtatttataggcgtttagcgttgcgggggatgtttcgaggaatcgcgcggaggtttagttcgtggtagtttacgttggtagcggagtaggtatatttggtggggtaggcgacggttggaggtttatttaggacgttcgttagcgttaaggttagcgttaggcgggcgcgtacggcggcgtcgatttttgtttattcgggggttatggtgtgtagggtttcgtttttggaggaggttgtttttgcggggtaagacgcgtggagttcgaggaggcgcgcggggagcgcgggcggtttggggagcgggcggcggagttagcgcggaggaggggcgagttcggtgtttaggcgtacggggcgcgggcggagcggggcgtttcgggcggcggcggcggtagtaatagtagttttatcggcggggtcggcgttgtttcgttgcgtatcgttgggagtgtttaggtgcggagcgttttttggtttcgttggttcgcgggtcgggttggggatttggggcgagcgtaatggggcgtggcgttcggggaggttcggtttggggttgggttggggagcgcggcggttgcggttggggtacggggcggtcgggtgagttggtcggcgttcgttttttttatttagtgagtacggtagatatcggagacgcggggtttattttttcggttttttttcgattaagaaacgttaatttcgttttttattggttgcgtcgcgcgttatgtcgattaagttgggaattttgttggagcgatcg

SEQ ID NO: 11163 - DNA, 909 bp, Artificial Sequence
  Description of Artificial Sequence: Synthetic polynucleotide
tcgtttagtatagacggggtattttcggtgcggtttgttatcgttttgtttggcgttggcgtttttagagaaggttatgtcgattttttttttatttcgttttagatttttttttttgagttgttttttttatagtttttttaggcgttattgagagtttttcgttttcgatgggtttggggcgtttggattttttcggggttattttgtcgtttttttttagtttttttttttattttttgtcgtcgttttttcgtttttttaggattttgcgtatttaggttggttttatgttttggggtattttagtagtgttttcgggttttcggttattcggtgacggagggagggagaggttggcgagggggcggcgttttaggttttagcgcgattcgttttttagtttttttcgtcggttatagtcgcgcgggacggggtagggatttcgagaatatcggggatttgcgggtcggtggtttcgggtaggttatttttgacgcgggtgcgaggtttttcgcgggcgtgtacggttgggtcggagtcgcgtcgggggtcgggatacgtttggggttagcgttggcgtcgtcgttcgggtggggtgggtcgggttcgggtttagttttttttttacgggcggttcgcgtttcgttttttagtgatttttatattttttgcgtttcgagttggaatttcggtaggttttgtttcgggtcgcgcgcgttttttggggattagggttgtggtttttgtttcgcgtcgtgtttttagatatcgtcgggcgttcgttttttatttttttttttttttttttatttcgcggttgacgagggtcgtttttaagtggttatgtttttcggtatggacgattttttagtgtttttgagggtttagggtttcgttttcgtttcg

SEQ ID NO: 11164 - DNA, 2150 bp, Artificial Sequence
  Description of Artificial Sequence: Synthetic polynucleotide
acgtcgcgtttcgtcgttcgcgggttcgtcgggagattgcgggttcgtttcgcgggtggggcgtttcggtttttttcgttttttggaggttataggttacggcgacggcggtgatcgggagagtaggttgcgaggcgcgttttatcgggttatagataaattatttcggtagcggtcgcgtcggaattttttttaagttattaaattcgtttacgcgcgggagagtgttggggatgttttatgcgttcgcgattttagaagttaggagtgtgttatttttttatatatttattttcggttttgtacgtttttttttacggttcgagtttttgtaaatgtttggttagatcgaggtcgtcgagatgttcgttttagttttttttttcgtgggtatttagggtagttcgtgagcgtcgttcgtcgtcgtttttagcggcgtcgggttttcgaatattcgtcgggtgagcgaagtatagcggggttacggagcgtttcgacgcggggacggggagggtagtgttttttttataaattagttttttgggtgaagtttttggggtttggagattggagtgtagggtgtgtgtgtgtgtgtgtgtgtgtgtgtgttgtattttgattttatggaggatttgtgggagaggaggtgtaaggttttttttttagaagtttggcgtttttaggttttagttacgcgggacgtttttcgataattcgatttttcgttaggagagattcgatttaggtttgcgtcgcgaggtttttagttcgtttttttttgcgattttaaatttgggttttgatttttcgtcggtcgcggtggttcgggttattcggcggcggttgatagttgagcgtaaaggcgtcgcggttaaggttttcgcggagtagttcgggatgcgtacgtcgagggttaaggaggaggtcgttcggtttggagttgggatcgtaggttgggggtcgggatattcgggtttcgtcgggtcgggggtagggtcgcgggtttgatagttgttgcggttcgcgcggacgcgcgttttttgtagttcgttttttttatgtttgatttattattttttgttttttttttttttgttgttttaaaatatttttcgacgttagtaaaatataatgcgtttcggtcgtcgtaaatagtcgggagggagagtatatattcggcgcggcgcggtcgtcggttcggtttttatttttttttcgtttttagaaaatgttataaaagcgggtagggcgcggggagggcggttgcgcgttcggcggtcggggtttttttttcgcgtcgtttttttacgttttttcgttcgtttcgcgcgttcgtttttttcgtaaatttgtttcgttatttcgtttagcggcggggttcggggttcggggttcgggatttatttcgtcggagaattttgcgttttttttcgttttttttttttcgcgttttttcggttcgtagttttttttcggtagtcggcgaggtgggtagttcgtgggttatcgaaagttcgcggaggggacgcgtattatatggtagttcgtttttagtttttcgagtgcgttgggaagggggaggggaaggggcgaggggaggtcggggggaaagcgagagcggggcggcggcgggagtgggtaggcggggtggcgagggcggcggtcgtttacgttagcgttgtgcgatcgtagttcgggcgtgtacggtcgttgttgtcgttgttgttgttgttgttgttgttgaggcggcggcggttcggcgttgtttgtttcgcgtcgcgcggtttgcgtttttttcggaacgtttatatttttaatcgttatattgttgatattcggcgttgacgttattcgttttttatttataataattttacgggagtcgggtagcgtattttttcggtcgttggggcgcggtacgttcggcgattagcgtaagtcgtttcgcgaatggcgtttcgggggttggggcggggggcgggggacgggggcgggcgcgcgcgtttcgttggttcgcgggagggggcgcgttttatgtcgtcgtagtagtagattttttcgttttgtgcggtcgcgcggttcggagagtttttttttttcggttcggttgatcgtttcgttcggtttggttttttcggttacgaaagacg

SEQ ID NO: 11165 - DNA, 506 bp, Artificial Sequence
  Description of Artificial Sequence: Synthetic polynucleotide
gcgttcgttgttttcgagtttcgggtttgagtgttggttggcggagatttatagtgggtgtttcgttttcggacgatgtttttgggtttttagatttagagtttcgggacgaaattgttttaggaagattcggaaggattcgtcggtcgcggtaagggataggcggtttttgagataggaggagttaggaaatgcggggtttggtggggtgaggagtacggggttttttttttattttcgcggggattttgttatcggtttagtgtggaggttttatcgtttcgttcggattcgtggggtttcgatagtgtggtttttgcgaggattttttttatttttttcgttttggggttgttgcgggagggcgttcgggtagtattaggttttgagtgtttagggttcggtaggggtttttcgttgtcgtttttttgatttcgtcgtttgcggtttagggttgttggttttttcgttggtttgggaggttttagtatggacgtcgtgaggcg

SEQ ID NO: 11166 - DNA, 1503 bp, Artificial Sequence
  Description of Artificial Sequence: Synthetic polynucleotide
tcgagtgggacgaatttttcgttagttttgggtttttttatttgtcggttcgcggtcggcgtcggtataggcggagggcgtttttttttttttgcggttttaagttaagtggaagatttttttttaagttttttttttcgaagtttcgcgggtttttcgcgttttagttttagttatagtttgtggaggcggtatttcgaggttgggcgttcgtgcggcgttttggttttagtatttttcgtttcgaggttcggtttcgggggcgcggtcgttcgggttttcgtgtgttttagggggtttcgggtcgcgagtcgttgtcgaatggtttttgataaaaaaatttttgattattaaggttagtttttttttgaaagtttcgttcgtttcgatataggaagtagaagggagcgagagttttagagcgcggcggtagcggcggtttggtttttttagagggttagagttagggatatgcgggcgttcgggatttcgcgtttcgcgcggttcggcgtttgagcgttttcgtttttcgtttcggagttgtcggcggtatgattcgatacgtcggggcgttcgcgcgcggggattttacggggtaagttcgggcggtcgtttttttttttttcgcgatttttacggttcgcgttttggtcgttttattttattttttgttttagagagtttttcgggcgcgtgatttcggggttgtcgggttgatacgggatttttatcgtggtcgaggttagaatttggttttgcggggtagggggcggttttggtgatttcgttggattcgatgttggttaaatttttaaggttaggtattttattgggaatttagtgtatattttaggttgttggtggacggattacgagggagtgcgtcgttatttgttagcgtcggggttgttcgcgtggacgcggttttttttttggcgtttgtttcgtttgaattttgtaaataaaattcgcggttttagtttcgttagtttgttgtattcgttgttttgcgagtcgtagcgcgcgttttcgggtattagagtttcgttgggcgtggggtcggagattcggattttcgtaattttgggtgttcgcggtttaatagttgatcggtttttttggatcgagggtttattgggtttttttttcgtcgtttttttgttttggtcgtagacggtgattttcggatcggttttggtcgagtttagtgtttgggtagggtttagggcgtacgggttgcgcgcgggttgtggatgtatgacgtcgaatggtttgggaattgatttggagaggagttttcggtggttaagttttcgtttcgtttttttgtcgtttttagttttatttcgcgagttcgggtattgttcggggttgggttttgggagaaagttttttcgttttgtttagtttagagggcgttttgagaagttttaggtgttgtagagacgttcggtcggaggcggattttcggggaaagtttatttttgggtatttaggagcgcg

SEQ ID NO: 11167 - DNA, 907 bp, Artificial Sequence
  Description of Artificial Sequence: Synthetic polynucleotide
tcggatcggtatagggggacggttagacgggatgtcggaagttaagggacgtagaggtcggcgggtggcggcgatggagaggatagattcggtttttagaggaggtcgtgagcgcggggtttgcgtcggtcggaggagggattcggggggttgtaatatggttgttcgggcgtcgttttttttttgttaagttagggttttggggagttgttgtcgtttttcgttcgggttggggcgaggaaaggaggggacggcgttgcggtttcggaatttgtattgcgattttggtagagtaaacgttgtatttgtagtttcgaattgaattttttgtttttttttttttttttttttggttacgttttttttttttttttttattattttattttaattggttttaaacgagggtgaaagttgagtttgaggatgtcgttgttatagaaattgtatagtaattaagggttggggaggcggggggggggggcggtaggttttttttttttatttttagtacgcgtatatttttttttatttttttagttcgtcgcgttttttcggagatttatatcgttatttttcgtcgtagaacgggagggataggaatacggacggagggatcgggacgaggggagggttttacgtagtatagttgtttttttgcggagcgtttaggagattcgggtatttttggaagcgttgcggattgagttgttcgcggttgttttcgtttcgagggtcgggatagtattttaggagaagagggacgaagagggacgatagataaatagttggggagaggcgggggggggcggttcgtggggttcgttgggttttatttagttttgttcggagttgttcgaaatagtatttaggtttttgcgggttaggatgaaaggtacgtgggtcg

SEQ ID NO: 11168 - DNA, 1925 bp, Artificial Sequence
  Description of Artificial Sequence: Synthetic polynucleotide
tcgtcggttttaagtaggaaggcgttttcggtatattagttttttttagcgtttttagcgggttcggcgtttggagggttaaggcgggcgcgtttcgcgggtgggcggggggggggggacgggatcggtgtcgggagtttcgttgttttggcgttttttgggtttaggtttagtcgttttttgggtttttttcgcggggtcgttttcgttttttttttgtcgagacgggcgtggggtacggggtcgtcgttcggcggggagtttattcggcggcgtagacgtttcgcggtttcggggagggatttggtttgggtttcggtttcgcgtttttttggggaggagtcgagaggttgtagttggcggcggcggtttcgggcgggagggggttttaggaagcggttaggtcggagttttttattcggtcgtagttgttggtttggttagaatcgagcgcgttttttcggttttcgtcgtttttttttgtaaatcgcgggtaggaggagttttttttttagcgggttcggagtttagaggcgtcgcggggcgcggtcgaggggaggaggaaggagagcgggagcgtagtcggttcgggtttagtcgtgattcgtggggcggcggtttcgttaatttgtgggcgttgacgcggggggcggtttcgcggcgttcgatatttgttcgttcgggacgcggggcgtcgagaggttcggttaggcgggagttgcgttcggggcggtcgttgtatttgttcgggatttcgtcggtcgtttttcgcgtttatttttttcgtttttcgttttttttttttttttagtttcggtttttcgggcgcggcgtgagagtagagttcggttcggaggagtcgtttttttttcgttcgttcgttcggcgtttggagaggagcgcgttgaggatcgggacgtttgcggtcgtcgttatcgtttaggttcgtcgcgtttcggtcgggatggatttatacgttcgatgagtttcgcgtcggcggttgcgagcgtcgagtttttttttgttgcggttttagtcgtttttcgcgcgttcggtttcgcggattaggatttttgggtttttcggttgagggcgcggtcgtttcggagaggtcgagcggggacgggttcgagatggcgcggggatttagcgtttcggcggcgggcgttttgtacgcggttcgggttcggggatagtttcggagttggtagtcgttcggtatcgatggattttgattcgcgaggcggcgtcgcgttcgtgtttagttgtagttagaggggcgcgcgggtagaacgcgttttaggttcgggtcggttcgcgcggttatgaagatgatgttggtgcgtcggtttcgcgtgtttattttgatggtgtttttggtggtttgcgcgttgtatatcgttttggatttgttgtttaggttggagcgacgcggcgcgcggttttcgggggagttcggttgttcgtgcgcgtagttcgtcgtcgaggtggtcgcgttcggttgggtttaggttcggggtcgtttcggggagttttcggtcgtttttttcgtcgtcggcgacgcgggttggtttaataagtatacgtttcgtattttgtaggattttagtttcgattttttttttaatttttcgttttattcgttggagaaattgtcgttcgcggtcgagtcggtcgagcgcgttttgcgggggcgggatttcggcgttttaagattttacgatttcgcgtatcggtcgttgttgcgagatttcggttcgcgtcggttcgagtcgtttttcggtttcggcggagacgttttttttttggttaggttgttcgagtattcgttttatcgggtggcggtttcgtcgtttacggaggaggacgttttgtttaatgtgaatagcgatattaggtttagttttaaagcggcggagaattcg

SEQ ID NO: 11169 - DNA, 1287 bp, Artificial Sequence
  Description of Artificial Sequence: Synthetic polynucleotide
tcgtggttcggaagtggattttgttcgacgcgggggtggtcgttggagggtcgaggatgtttatataggtttttggagggtgtgttttcggagtttgtttcgttttttggatttatgggggattagtaacgtcgttatatttttttttgtttttgttagtcgttttttcgttttttttttttggttgaggttggtaaaggtaggtaggtatgggggggcggggttttaggagggaggaggggttggtgggcggggtttacggatatttcgtttcgtttttagtggggtttcgtattttttatatttcgcggtttttttaggttagggttttttattatcgcgtttagaggtcgggttagtcgggcgtgtattttaggggcgtttcgtttttcgcggtttgggattttttagttaggatagtataaaatttttttatcgtttattttttgtaaaaaatcgtggttttcggcggattttggagataggaggtgtaaagggcgtttatacgcggttcgggttcgcggtcgagagttggggggatttggagcggggtcgggtcgtaagaagattttgattttgtttcggcgttggggcgcgtgttaagggttcgcggggtattagttgtattttcgaatttttgtgtttggtcggggagtttttaaggttttatttcgttttggagggggttgcggaagttcggaggtgattcgggttttgggaggggcgtttttaacgtgggggaagggagataggggttttcgaagatagcgcgagattcggagggggttttttcgatttaagacgtggtaaattgaggtcggcgaggagcgaggttgagttcggggattaggcggttttttattgttttttcggttcgtcgtttttttgcgtttgttcgtacgggtagggtcggcggtcgagtttagcgggttcggggttaggtttgggtttcgggggcggcgttttttttttcgcgtcgtttttatgttcgtttttcgcgtcgttttcgttcgagttgtttttttttaagtagtcgttatcgcgtattttgtgttggggtcgcgggatgcggggttggcgcggggttacgtttcgtcgtagtttttgttttattcgtaggtaggagatcgcggttattattagcgttattagtagtatcgttagtttagtttgggcgtaaggagagggatgttagggattcgcggtcgtttcgtttcgtatttttttcgtttatatttttcgttgagataggtttttttttttttcgggagtttttcgggttacgcg

SEQ ID NO: 11170 - DNA, 2906 bp, Artificial Sequence; identical to SEQ ID NO: 6464
  Description of Artificial Sequence: Synthetic polynucleotide

SEQ ID NO: 11171 - DNA, 2146 bp, Artificial Sequence
  Description of Artificial Sequence: Synthetic polynucleotide
tcgcgtgttaggaaaagttgtgaggttggaaatttcggagtaaggttcgattttggttagatttgtaggttgcggaatcgggggcgcgcgggcgtagcgtagtatagttcggttatggagtacgcggtggttttttgcgttttttatttagggattgagttcggggttgtcggggagagcgagagcgagggcgtcgcgttttcggcgtagatattttgtagtttcggcgcgtttttgtgttttagtttcggggaagagttttcgtcgtagtttttcgttttagcggcggaaggcgcggttattttttcgttttttagcggtggttcgcgggtggtggagcggtagtgggaggtcggtagcgcgggcgtcgcgttttcggaggagttcgcgttttttgaggagcgcgcgtgttcggaagagttcgcggcgtcgtttttcgaatcgcgcgtttggtttgaggatttcgcgtttttcgaggagttcggggagttcgcgttcgtattttcggggttcggggcggtgtacggggagtcggatttggtgttggaggtgtcggggcgtcggttgcgcgcgtataaggcggtgttggcggcgcgtagcgattattttcgcgcgcgcgcgtcgcgggacgtgttgcgggtgtagggagtgagtttgacggcgttgcggttgtttttcgtcgacgtttatagcgggcgtatggcgggcgtgcggttcgataacgtggtcgaggtggtggtcggcgcgcgtcgtttgtagttgttcggcgtcgcgtagcgcgttatcgacgtcgtggggtcgtagttgagtttggttaattgttacgaggttttgagcgcggttaagcggtagcggttgaacgagttgcgcgacgtcgtttattgttttatgagcgattattatttggaggtgttgcgcgagttcgtcgtgttcggtcgtttgtcgggcgtagagcgggatttgttgttgcgtcgtcgtttgcgcgtcggtcgcgtttattttttggtcgcggcgttcgggtcggcgggggagcgcgcgggtagtcggttttagagtttttcgggggacgcggacgcgcgcggggacgcggtcgtttattgtttttacgcggcggtcggagagtggcgcgagttgacgcggttgttcgagggcgcgtcggcgcggggttgcggtttgtgcgttttttataattattttttcgtggcgggcggcgtggcgttcgcgggtttcgacggtcgcgcgcgttcgttcgattaggttttttgttataattcggttacggatagttggagcgtcgtgaggtttttgcgttaggcgcgttcgtagttgcggttgttggttttggacggttatttttacgtcgtgggcggcgagtgtttgtttagcgtggagcgttacgattcgcgcgtcgatcgttgggttttcgtggcgtcgttgtttcggggcgttttcgtcgtggcgtatgaggttattatttgttacggcgagatttacgtgttcgggggtttttttttttatcgtttgtttaagtatgattcgcggcgcgacgagtggtaggagtgttcgtgtagtagtagtcgcgagcgttcggtcgatatggtggttttcgacggttttatttatcgtttcgatttgagcggtagtcgcggcgaggcgtaggcggcggggtcgagcggggttagcgtgtttcgatattattgtttggttaagtagtggagttcgtgcgtcgcgtttttgcgttttttcggcggttttacgggtttgtagttttttcgttgcgtcgttttggacggcgttatttattgcgtgagtcgcgcgggtatttggcgtttttagtttgttcgggaaggcgaggtcggcggcgacgtaggttagggcggcggtttcgaggcgttgggcgtttttttggacgttcggggtgtgtttatttcgttcgtttttagtttgtttgagaagtcgtttcgaggggagtagggcgtttcgtaggtcggcggggtcggcgggcgtttttttcggtaggggtttgcggggtttaggtttttttgggttcgcggaggaggacgtggtggggagtcggggtcgttggttacgttggtggtttggatatttcgaaggagtttcgaggacgtttttagggtcgttttcg

SEQ ID NO: 11172 - DNA, 865 bp, Artificial Sequence
  Description of Artificial Sequence: Synthetic polynucleotide
gcgttttgcgttttttttttacgttatttgttagggagtcgttaaatagtaagatcgcgcgttttgcggttttagagtgcggatttcggtcgcgtgcggttttgatcgcgtcgttttatttttggcggggttacgtacggacgttatggttggcgtcgcggagtcgggcgatgcgcgcggattttttcggggttttgattgtttttgagttttttttgcggggggcgtgcgcggttcgtttttcgcggcgttacgcggttttttttcggtcggggattggtgcgttgggcggggcggggcggggcgggataaaggcgcggggtttggttgcgcggggtttgcgggtagttttaattttgggttcgtagtttgcgttgggtgcgtaggaaggttagtgtgggggtcgttcgatatttttttttcgcggaggtgggagtcgagttatattttggagtggggattggtcgcggagcgggttgtttagggtcggtcgaggtcggggcgagttttgcgcggcgttggagattttgtattttcgggcgcgcgtagggttttcggtcgtggtcgtagagttaggaggggcggtttcggagttcggcgcggggagggtttaggcgtagtcggggttggtagggcgcgatattcgtttttttttatttttgaaagggttttttacgtcgagaagaggggcgggtatggtcggttcggcgaaatcggtttgtatagattttgggaagttatcgtttgcggagggtgggattttatagtttgtttatttgtttaggttgagatttcgtgttttagttttggatgttttacgggtttttcgtttcgggtagcggcgtacgggaggagaagattttcg

SEQ ID NO: 11173 - DNA, 865 bp, Artificial Sequence; identical to SEQ ID NO: 11172
  Description of Artificial Sequence: Synthetic polynucleotide

SEQ ID NO: 11174 - DNA, 1463 bp, Artificial Sequence
  Description of Artificial Sequence: Synthetic polynucleotide
tcggggggtcgcgggacgtttaggaagcgaagcggggaaggtttcgggcgcgtcgtaggattcgcgttggagatgggtttgaagttttgttttgaaaaagtcggttcggagtgggttgttttcggtgtttttcgagtttttatgttgttatttaagtagtagaggaagaatcgggtttggttcgggaagggtgggtttagggttaggggtgtaaatttttcggtaaaagtcggtaaattaaaagtcgtatatattttaggtttcggtttaggtttcggcggggtagggttttcgaagtttcggggcgcgtagacgtcggggttttcgggggttaagggaacggcgggattcgatttttttgttttcggtttttcgggttttcgtttttcgattagtcgttgagtcgggggttggggtcgtcgttttcgttcgcggttcgttgttttttttcggcgcgcgttattcggtcgtcggttttttttttcgcggggggtttcgtttcgcgtttcgttttttcgggttgtagtcggtagtttacgtttagggagggtggagggaggaggagaggcgcggagaggagggaggggagaggggagggaggaaggcgagagaaagggagttgtttttatttcggattttttagagtttgtttggagcgcgtatttagcggttttcgggttttagcgttttagtcgcggttcgcgttttttcgtttcgttttttttttttttttttttttttttttttttttttaggtattttcgttttttttttttagcggttgtagtttttagttttaatttttcgcgtttatttttgggacgcgcgttttcgttttattttttgttttttttttttttttttttttttttttttttttggttttcgttttttttttttaggtcgttttttcggggttcgattgtttcggtgtttcgttttcggttcgcgttttgtttcgttttttttttgtattttttgagtcgttcgtcgtcgtcgtcgtagattcgtcgcgggagttttagtttaattcgagttcgatagttattgtttcggttttagttttagttttatagttcgcggcgttcgttcgagggagtttcggcgttcggggaaggttttagtgggttagcgcgttttcgtttagtttcgcgttttagttttgttcggttcggcgaggaaggatcgggaagatgaataacggcggtaaagtcgagaaggagaatatttcgagcgaggttaatttttaggaggaggaggtattgggcggttcggtgtggtggcgggggcgacgcgggatttagtgcgggcggtcggcggggcgcgggttcggggcgcggcggtggaagaaggtttaggtatggttcgtgtttcggacgtagttttatagtgtggttcggggagggtggatttcgggagcgtgtgtttttgtgtttacgcgcgtttgcgggttttaaattgcg

SEQ ID NO: 11175 - DNA, 1437 bp, Artificial Sequence
  Description of Artificial Sequence: Synthetic polynucleotide
tcgtaggaatcgaggagtcggtcggtttaggtttttaaggttacggggagggggttagggcggaaaaggtagtggagtgagggtgtcgttttcgggtcgtgttaatttcgtttcgtttcgtgtcgtcgaggcggggttttggttacgtaggaggtgcgtttcggaggagggcggcgagcggttacggggtggggagtaaggggcgcgcgggcggtaggtatggaacggacgcggcgtatttcgtttatcgcgggacgttcggacggcggtcggcgcgcgcggttcgtttcgagttcgagagggcggggagataatgtttgttcggcggggtagtttaggtcgtacgttttcgttcgcggatacgggtcgtttttattcgggcgagagggtagcggcgggaaggcgtcgggagcgatggttatttcggtttcgcgaggcgcggtaggtttcgttcgttttttttcgcgttcgtttggcgtgcgttttattcggtaagtttcggggttatagatttatttttttttttagggcgtcgtcggagttcgcgtcggagtcggtgtcggtgttgtcgtcgtgttcgtcgttcggttttaggttgtttatggtgcgggggagggggcggcgggaaggaacgcgagggcgagcgcggcgtcggtttcgcgggaagtgggaaggggcgcggggagcggtgcgttcgcgggtgcggagcgggtggcgggggatttacggggtagtgagaggggtagttttcgcgtcgggttagggttatattaagtttggcgggtgcggaaggtggggagggggtgcggcgggggaggtagtgggagtcggaggggtcgtcgttttcgtttttttattgcgatcggcgagtgcgttgcggcggcggcggcggcggtagcggcggcggggggcgggcgtcgggggagggggcgggcgtcggcggcggggggcggggtcggaatcggttttagttggggttcggttagttttttttttcgttcgtcgcgcggttttcgggggaacgcgtagttaatttttatcgtttatcgtgggttcgtttcggtttcggtcgcggggcgtcggttttcggtcgggttttttttttttttttcgtttgggttagcgttttttttttttttttttttttcgcgtttttttttacggcgagtttttaaattttgatgaattcgttcggcgaatttttttaaaggggtcgcgcgttgcgcgttttagttcgcgggaggtggagtttcgtgtttcgtatttagcgtttcggtttttgggcggttttgttcgggcggtttcgcgtttagggtattcgtagcgaggttttcgggtcgtcgattttttttgtattttgatttagggttttggggttttcgacgtatttattttgtttttaaatttagtcgcgtagattttagtttcgggggatcg

SEQ ID NO: 11176 - DNA, 717 bp, Artificial Sequence
  Description of Artificial Sequence: Synthetic polynucleotide
gcggtaggggcgggattcggaggcggggcgtttgtttacgtcgtttagtagcggagggaggcgcggttttagtttcgcgtttaggagtcgtataggcgttcggggtcgtagtaggagtttttttagggcgtttagcgttgtatttacgagtcgcgcgtcgttttcgtttagtgcgtttaggagcgtcggtagtagcgtgtttacgtgtcgtatttgttgggattcggggttagttttttgtagatttcgtcgcgatcgggttaagtttttttttattttttttttttttttatatttttttgcgatttagcgcgaggtggtttaggtttagtaggtttaattagcgtatagtgggttcggggtttttttgttaggtgaggagtcgttttaggatgattttttttcgtaggagtcgtgcggtgggtcggttttgtaatagttaggcgaggtatatggggttagtacgttcgcggttttcgtgtaggtcgttgcgatttagggattaagtttagggttattttttattatttattcgggaagtaggtttatttttgtgaagaaggttatagtcgtgagacgttgcgggtcgttcgcgttgcgaagtcgagggagtaagtttgcgaagaggtttcgtaggtggtggtcggtatgtgttattatagtattggggtgggtggaaatgggagttttcgtttcgtttggcggttttttttttcg

SEQ ID NO: 11177 - DNA, 1713 bp, Artificial Sequence
  Description of Artificial Sequence: Synthetic polynucleotide
gcgttgtagattcgggttttttttttagtttacgcgtaagtcgggttcggtttatatttattatattttttcggttttcgtttagcgtcgttttttttttcgggtttttttagtatcgatttagtatttattagcgtcgtttttaggtttttggtttagtttattttcgggtacgtgtgagtgtgtgtttgtgttagtttgttagttttatcggggatcgggttcgtttatcgagagagaagcgttaatttttgttttagtattatttttagtttttggttttgtttggagatttagtggtttatttcgtgtaggcggtagtacgtttttagtattaatttgaagttcgttacgaattcggtgatgttttcgtattggtcgttggcgaattttttttttatttgtagtagatatatgttttgttcgggttgttgcgggaaggcgcgatcgtttcggttttcgttgcgcggttttttcgttattttttttttcgcggtggtaacgttttttaagggttgtagaaagggggcggtgaggtttcggtgttttttttgtaggaattcgtttaggatgcggtagttttgttgtagttcgtaggttagtttttgttttttgtagtaatcgttttcgattattatcgtttttattttttttttttgatcgttcgcgttttttagcgaggaggtatttttttcgtgggtcggttttgaggtttgggtcgtcgttgttatttttttttcgtcgttttttttttcggtcgtcggtggcggtcgttttttttttttagtcggttttatcgttttcggcgtttcgggtatatttatgtttcggtaggtttaggttgggcggtgtggaatagtcgttcgaggtgttgggggacgcgtgagcgcgagtcgtttttttacggttcggtcgcggcgcgtagttttcgttatatcgggtttggttttttttagtcgtcggttcggttcggtgcgcgcgggggttttgagtttatcgtcggcggggcggggttatatggcgcgcgaggaggggggagagaagaggagagtttaggtgttttttttttttttttttttcggcggcggcgcgcgtacggttttcgtcggttttattttttcgtatttcgttcgtttgttttttatcggttaggttttgtcgggtcgtcgcggtttcggcgttttattttttttcgggttagcggggggttgggagggggcgaggaggaagggggtttttttttttttttttcggagggggtcgtagcggcggtttcggtttttttttttttttatattttttttcgtttttttttatttgcgggggatacgggtagaaggaggcggtgtacggacggggttcggcgataattgttagttagaagtttcgttgggcggtgaggggggagaaaggggaggggtagggagagaagggggagggtatttagtttttcggttgggaagagttgtggagagaagtaaagaaagaggttttgtcgttattttcggtgcgtatgcgtagtagaataattttttttttttttttcgttattatcgtgtttcgtttcgttacgtaaaaggaagagtttcggtttagttataggtttagaagtttgttagggttgcgcggattaatgatgtaattaatcgtaggttaatcgaatatgttgatggagggggaagtaaggcgtttgcgtagtttaattcgttatcg

SEQ ID NO: 11178 - DNA, 699 bp, Artificial Sequence
  Description of Artificial Sequence: Synthetic polynucleotide
gcgcgttcggaaagtcggtttgggttttgttaattattttgaaggtaaagtatttgtatttttttcgtcgaggttggttggcggcgtcgcgttggaggggaggaggttcgggaggaggaggagaaagagtagcgggaggattcgggttgggaggggagcgtagggttggggaggtcgatgagcggttttcggtttttcggagaagtagtcgagacggtaaggaggaggcgaggttttgtcggggcgaggcgttgtttttacgcgtttcggtcgtcggttgcgggcgcggttgggcggggagtcgaggcggtcgttttcgtattcgttcgttcgttcgttggcgtttttttttcgtttcgttcgtatttataggtatatattttacgtttttagtagttgtcgttcggttttacgtatttatttgtatttttttaacgagttatttgatggttgttagcggcgtgggtttcgtttcggcgggcgggggtcggggcggggagaacgcggcgcgggatgtttcgagcgttcgttggggagagaagcggcggcggcggcggcgttgcgggcgcgttagatggggcgggaggaggggagattcggtatttatcggtttagagttgtttgacgcggtttgggcggatttcgtcgttcgggtgtttaggtacgattttagggatttagggtaaagcggttcgcgcg

SEQ ID NO: 11179 - DNA, 1191 bp, Artificial Sequence
  Description of Artificial Sequence: Synthetic polynucleotide
tcgatttttattaagcggatggttaagcgttattcggaagtgtttattggtgggggcgggaaggtatcgtagtttaaggtattcgcgggtagggagcgggttagggcgtgcgcgaggtcgggggtagttgggaacggaggaggaggggttcgttcgaggtttcgttttttatcggttgcggtttcggttatagttagggtttagagggtttcgagtttcgggagcggaggtcggagtcgggtttttgtagaggttgtttttttttgttttcgttcggacgtggttttcgttgttcgaggtgtagttgtagtagggttcggcggtatatggtttttagttttttaagtcgggtttttagggttttggggttgttcggttcgttttttcggtcgttgtttttagtttttcggttcgtgttggtttttttagggattcggcgtgttttcgcgggcgtttcgttgtcgttttcgtcggggagtcgtaaagtttgacggaagaggttgcggttttcgcgttttagtcgtcggttttcgagtcgtagtcgggcgtttttttgacgtagtcgcgcgttttgtcggttttattcgtttcgcgtacggatggtttttaagtggttcgtcgttaggtcggtaaatcgtttttttagttgttgtcgggcgtcgttcgcgcggtttcgttagtttacgtcgtcgtcgtcgtcgttggggttgtttttattatgagttcggtcggagcggtttggttttcggtcgttcgtagtatcgttttcgtcgtagtaattttcgcgtttagtggcgttattacgtatgcgttatatcggttttattttaatcgcgtcgttagtttcgtgggttgaggggtcgcgcggttaggcgcgggtaagttcggggttggtagggcggtcggggtgacgacggaggaggagaggaggtcgcgggcggcggttgttggtttagagttaaaggaggtcgggaatttgtttagattgaggcgtgttttgttttttgtggtggagttgttttttgggtttgttttttttaggttgcgttgatatatagttttttcggggagtgttttgttgtttagtttttcggttgcgcgggaaaaagcgtgtatttttagttgagttgtgttagggcgttttcgtgtaggtttgggtattgtaggaattagtcgttttcgttcgtttcg

SEQ ID NO: 11180 - DNA, 536 bp, Artificial Sequence
  Description of Artificial Sequence: Synthetic polynucleotide
tcgttttttacgtgttcgcgggggggggcggggtcggtggattgggcgtgagttaattggttggggggcggggtattacgggttggtttcgtttaggcgttcgcgcggatttcgggtggaatgacgggagggagtttcggtagtttttattttttagcgatggcgtcgttgtgtcgcgtttagtttttagtttgtcggtcggtatttatcgttattcggagttcgtttagacggtgagatttggggcgggttcgaggtagcggcgggacgttatttgcgatcgggattatgaggagttgttagattcgtggggtcggtaacgagagtagtcgcggtatttgttgagaggaaagagggagcggttcggcgcggttggggcgcggtagaggtttgttcgattttcggttatgttattgttttgcgtgcgcggtgagtgcgcggattgaggcggggaggcggggtgtcggcgtagaggttttcgtatttttttagtggacgttcggtgatcgttttatttaaattttatatttcgttcg

SEQ ID NO: 11181 - DNA, 728 bp, Artificial Sequence
  Description of Artificial Sequence: Synthetic polynucleotide
tcgggcgttttattcgtcgtttatcgttttatttttttattttttttattcgggttttttaagtttttgatttaggcgttagatttttttattatatttttttattttaggcgattcgttttggtttcgggtgtttttagtttgcgcgggtcgtttttagttttcggtggatattcgtttttagttcgtcgttttttgttcggttttgcgttttttggaatttttgggtttttagttttcgtcgtttttagaattgcgtttgcgtaataatggttatagtggtgagggggttttttcgtcgagatttggggatggggcggggcgtagggaagggaatcgtcgcggtagtgtttgttcgggggttgggttggttttatcgggcggggtcggtttatttgtttttttttacgtagtgtaattgattttgttttttgggttagagatggttttgggtttcgggcgggagtatcgggttttgtagttgtatttgtattggggggttgtaggtcgttcgggttcggagtatattgtggaaggttatcgtttttttgtcgaggtgagcgcggagttggtcgagaaggggtaaaggagcggggcggagcggggttagagacgtggtttttttttattttcgtgttttttttagatttacgtggtttattttagtatcgtttttgttagagttgacgaggttttggggcgttcgggaggtttggtcgtgttggtcg

SEQ ID NO: 11182 - DNA, 1431 bp, Artificial Sequence
  Description of Artificial Sequence: Synthetic polynucleotide
tcggtcggtttttttttttttattttttgatttcggtcgttttacggatcgtagggattgttttatcgtttttttttacgtaattattagagaatttttttaaaaatatagattcgatgaggagtggttttttcgttttttttttgtgtcgagaagggatttcggtcgttaataataaagacgtttttcgttttttttttttcgtcggttcgggttcgtttttttcgcgttgcggttttcggtttagcgtttttttttcgagtcgggttgcggcgtttttaaatttcgaggtcgtacgtatttgtatttgagcggttcgggtcgaagcgtcgggtagaaggggtcgagagagaatcgtagtcgacgcgttgttttttataaggcgagattcgcgtttcgggcgtcgttcgatttttttcgtttgtagattggttcgatagaggagcggggattagggttatagttttcggcgtcggggcgaagaaggacggcggcgttttaggggtttcgtttacgttttcgagtttcgtttcgcgtcggttttgtttttttataagagttcgcgttttgttgattaacggtttcggtgcggggcgttggagcggtcgtcgttgttcgtcggttgttttcgggttttacgtttcgcgcggtcgtggtcgtagtcgtcgtcgttatcgtttttttttttggtattgtagacgttatttagatttagttaggttttttttttttttaattttgttttttttgtttttttttagtttgttaagcgcgaggttcgtttcggtagcgggaggaagattggaggggaacggaggggacgagtataatttttattgagttaggagttggttattgattggaggaaggtgttaaagttgatttcggttttagtttattagcgggcggggggagagacggagtttagttttgttttatttttattaattagaggtcgttcggtagggtgggaggcgttttgagtttaaggagaggttgagttcgtttagtaggaggcggggattgcggaaaagaagaattaataggaataaaggtttttcgtttttttgatttgatggattatatattcgggttaatgggggaatttttatttcgaagaaagtgggatttgtttttcgggtttgagaaagaggttgcgcggagtcggaggggtcgaggttgcgtcgcgtggagtggtttggtttaatagtagggagggtagagcgatgttttttgattttttagaagagttacgtgggttgatttagagtcggggcggaaaggttgcgtttgtttttttcgggttattgatagaagcgttaatttttgggagtagttcgttggttttttttttttttatttttttgtttgttttcggcgaggggtggttttgatttcggcgatgagtttttagaaaggtaacgtggttcg

SEQ ID NO: 11183 - DNA, 588 bp, Artificial Sequence
  Description of Artificial Sequence: Synthetic polynucleotide
tcgtagaataggcgcggagttaggtttttggatttgttttgttggaaggagggtcgcggagacgtaggcgtttcgggtcgttcgcgttgtttttgtttgtttcgtgcgggagtcggggtttttggttttttggttttttggtttttgcggttcgggcgaatttagagcgtattcgtacgtcggtttcggtcggtttttagcgttcgggttttacgggtcgcgtttttacgcggcgttttttagagattttttttttttcgggtgggcggcgtagcggggtttcggcgtcgcgaggatttttcgcgttagaataaaggaatgtggggagggggtagggaggagtttaggttattgagtagttttagtataattgtcgttcggaggcgtttttcggtttcgattcgaggttttcgttcgttattattagattcgtttttagtttcggattttcgtagattttatcggttcgtaggagggagcggcgtattgggggtcgtacggattcgttattggagatcgcgatcggaaggtggcgttacgcggtttttataggtttgggatttttattcgagttcgtaaagtaggtcg

SEQ ID NO: 11184 - DNA, 1203 bp, Artificial Sequence
  Description of Artificial Sequence: Synthetic polynucleotide
acgtttaattttcgagtttgtacggtgtagtatcgtttattttgggtttagggtaatttgggtgtaaacgtttttgcgggcggatcgcggggtgggtttcgggtatataggaggattagtagtagtcggtcggtaggcggagcgttgttagaggtttgggttttataataatttttataggattaaaataaacggcgagacgggttgcgcgtataatagtatattcgggcggttagtcgagtcgggggtttcggttcgcggttgcgttaagttttagaattatttagtttcgtgtttgtcgttcggggttcggtttcgtttcggtcggcgtttatttggcggtgtcgttttcggaagattacggcgaaggtttcgtgttttacgagattttttttgttgtattcgaagttatttattatttttatggtcgcgttttcggggtatatagcggacgggcgggcggcgtagtgcggcgtaggtattagtatcgcggtttcgcgggttcggagcgcgttagcgtgcggcgggtttggggtagtcgtagtttcgggttcgggcggatttttatgtcgagagatcggagcggaaattggggaagttgtcgcgcggagttagggttagcgaggttcggttcggtttttgtcgtttatggttcggtttgtcgtcggtcgttggttgtttggcgaagcggtttcggcgttgtcgggttaggggtgtcgttatcgttattgtgcgcgtttagagtcgtatacgcgttttgaggtagtgaggggttcggtattttttatttttagttcgtcgggttttttcggtttttttcgttcggggcgttgttgcgacggcgacggtcgtcgttttagaattcgtatcgtcgcggtttcgcgttttttcgtttcgcggcggcgtttaacgttttcgcgcgcgttattcgttttcgcgcgattggttgtttttcgcgacgttcgcgcgttttgaaggtcgtagcgttagtcggtttttttcgtcggggaaaggagtgcggttagggtttggcgttcgtagttgggtagattttcggtcgtttttgaggcggggacgaagggcgcgattcgttgcggttatagcgggttacgggttgcgggtttcgttttgggtttggggagtagattcgagtcgattacgtttcgggttttaggtcgttgggaggcggattttagagaagcg

SEQ ID NO: 11185 - DNA, 5370 bp, Artificial Sequence; identical to SEQ ID NO: 6514
  Description of Artificial Sequence: Synthetic polynucleotide

SEQ ID NO: 11186 - DNA, 1691 bp, Artificial Sequence
  Description of Artificial Sequence: Synthetic polynucleotide
gcgtgggggagcggggcgggtttggtagggacgttggtttttcgatcgtgggataggggttgggttgggacgcgggtttttattaggagtcgcgggggaggggtagggtcggagtttttattttcgtaggggaggggttggttcgggacgcggttttttcggggcgtaggggcggggtcgggtggtacgtcgggtttttttttacggtcgtgagggaggggtcggcggcgggggcggatttttggcggtttttttggttggggttcgcgcgttcgcggtagtttttcgtggaggttattgttcgtgttagtttttttcgttgtttcgttttttttcgttgtcgtcgtcgtcgtcgtcgtgttcgttttagcgtttttatttcgcgtttgggagcgaggagtcgttagcgttttcgtttcgtcgtcgtcgtagcgtttttaggtcgttattcgttatcgaaattttttagcgttcgcgtttttttcgggattcggcggcggcggggcgggggcggttcgggggcggcgcgcggttgtttcggggcgtcgggtttttttcggtcgtcgtacggtcgggattcggaggttgtcggttggagggaggttcggagcgcggtcgggcgcgcggcgtcgttataagttgcgttgttcgcgacgaggtgagtgcgtagggttcggcgggtcgggcgcggggttcgtaaatttttgcggggaggcgggtttcgcgttgattttttagggttcggtcggcggttcggggcgttcgaacgttttattcgtttttggaatttttgtaggtgtaggtcgttaattgttttcgcggcgttcggattggggtgcggcgcgtttttaggagtttgaataatatttcgaggtggtcgtttttcgaagtgtcggcgcgttttgcggggagagacggaggtcggcggggggtttttttgttttggggagggggaagtggtcggtaagtttagggaagcgttcggtttttttttcggtgtttttttgtttgtcgatttaggggtttgttgggtaaatttgcgttatcgcgggtttcggggatcggggtggagggcggtggcgggattttttcgttgttggggagaagagttttatttatattcgggacgcgggtcggttttttcggattcgggtggaagcgtagtttcgcggagtggggtaagcggcgggcgaggtggcgcgggtttcgtgtttgtttagtttttgacgcgtagaaattgttaaggaagtcgggagttttagtttttcgtttattttttcggtttgagcgtacggttgggttgggggtatttttggttcgtcgagggtttgtagagcgtcgttcggggagagcgtagatttgttgttgtttttgggttttgacggggcgggtggggtgggtttcgtagattttgggtttcggttttgttatttagggggattttttttaacgatgggatcggtgttcggagtggagtatggggagtgcgttttcgggagtcggcgttggtcggatatgtgataattgtgggtcgttggaggttcgtttgcgttgggatagggtttggattttacgtgcgtcgtttgtgtttcgttagatcggggtcggggttcgttttttgtaaggtttcgtgtttttttagttagttgcgttggacgttttataaaggtagggattgacgtttattttcg

SEQ ID NO: 11187 - DNA, 1223 bp, Artificial Sequence
  Description of Artificial Sequence: Synthetic polynucleotide
gcgttgttacggagatttcggtcgtcggagatttcgtcgtagcgaggttattgggtttttcggtcgcggggcgggagcggcgtcgatacggggtgttaggaggatttatcgggcggaggagggggtttgtttattttttcgtatttttttgggtttttttttcgggcggtgacgtgacgtgttgacggcgggttcgtgtcggggagttgggtcgttttttgttagtttcgagttcggtttttttttttttttttcgttcgttttattagtcggagttcggtttagtgttttagagaaaggtcggtttgtagtattcgttatcgtcgtcggtcgttcgtacgttcgttcggtgagtttcgggtgtcgtcgcggtcgcggggtttagtgcgcgtatagcggtttggtttcggtttggtcggcggttcgtaaggcgttttttcgcgttaggtcgggcggcgtggcgcgcggcgtcgagtaggtttcgaggaggtcgtagttaggttcggggaggagttcggttgtttcgagcggcggcggaggcgcgtttcgtaagcgggcgggggttgggggagggtcgttcggttgtgtcggaggcggtcgaggggtttcgggtcggtttcgcggtcgatttggggtatcgcgtcggggtgaggtttggcgaggaggcgaaggttgtaggcgtgaggtgaaggtcgtaggtcggtcgggtcgattttcgttatgtaaatatcggtgagggggggggagggacgggggataagatggcggcggttcggcgtttgttgtaggggacgatagagggggttgtcgggagggggagtcgttattttggaggcggtgtttggagagaaaatttcgttatagttcgtgagggggggtgggagagcgggcggcggcggtagcggcgtcggtgacgggtttcggaggttcggcgcggcggcgtgtgcgcgcggaggggcgtgttcgtttttcgtggcggttattgtttttgtcgttatgatgagcgttcgggttttaggcgttcggcggtagcgttatttttttgttttgtttttcgtagtttcgtgattggttgtagttttcgttgcgttttagttgagttgtcgtaggcggttatcgtcgtcgttcggacgtcgggatcgttttatttttagcgtttttggttttgcgttttttttcgcgtttgtagttattcgagggtagtcggggtaggtggtatttcg

SEQ ID NO: 11188 - DNA, 1103 bp, Artificial Sequence
  Description of Artificial Sequence: Synthetic polynucleotide
acgttacgcgtcgttttgttatcggtgttttttgagtgacgttaaaacgttttggatggtggtattgggattatggatggggtttatttagtttttttcggtttgttattaaggggaggggtcgtcggtgggtttttcggcgtcgttgtaagttatcgggtttcgaagtcggaggtcgaaacggcgtgggtttcgaagcggggtcgttttttagggagtgcgtaggttagcgaggatttcggtgaggcgagacgttatttttatttggttgtttttgttgtttttatttttttagttttagtcgtttgtagtgattcgtgattttcgtaggtttttaaggatcgttgcgcgagggagggggttcgaggcgttttcggttcgtttttttttcggttttcggattcgagtcggttttcgggaaagagtttgttatcgcgttttcgtagttatttttttcgcgtgttcggttttttttagtggcgggggtacgtgggcgcgcggggtgcgtggtaagtcgtttttttttttacgttcgttcggtcgtttttcgcgcgcgcgtttcgtatatagttttcgtgtagtgggtagagttcggtttcgcgcgcgtttcgtttcgtttttggttagtcgcgttcgttttcgcgtttttgttttttttttttttttttttttcgttttttaggcgcgtattttttttttcgcgtttttttcgcgttttatatttatcgttcggcggagggggtttagttcgtagtcgtcgtcgttatcgtcgcgtttcggtttcggtgtaggtagcggtcgtcgtcgtcgagatagttgcgcgggcgagtatttttacgtagtaagttcgtttttttttcgtttgtgcgcgcgtgtgtgtttttcgttcgtcggcgttttgggtttcgggggagcggttgtttttttgtttcgtcgtcgtcgtcgttcggggttggtttttgcggtttcggttgtttggttttttagggttgggtattgcggtttcggcggtttcgttgaggtcgggggttaggggtcgtttcgggttgcggggtgcgggacgagggattgcgagtgcgaggttttttttggtgcgtgtttcg

SEQ ID NO: 11189 - DNA, 616 bp, Artificial Sequence
  Description of Artificial Sequence: Synthetic polynucleotide
acggtagttttcgattgaattaattcgatagtatttgtggaagtcgttggttttgtgtcggggttagatcgcgtaattaggagcgggggttttttacgtggcggaggtttttcggtttgggggttacgggttcggaggaatttgtttggaagttttttattacggtagagttttttggagttcgtttcgtgttcgataaggggagttttagatttgatttttttagtagtttcgcggggcggggtcgagaaggggcgggcgggcggaggacgttggcgggagaatgtgcggaatgtgttaggcgtttttatttattttaggaggggtagaggaaggggtcggtcgaggggaggggcgaggggcgaggtttcgggcggtcggagaaaatttgtttgtttttttgcgggcggagtttagttcgcgttttttcgtttttttgcgcgtttttcgttgtgtatcgcgtttcgcgtttcgcgtttgttttttcggttcggttcggttcggtcgggtgtcgtttattcgagggagttcgcgttttgcgattgttcgattttttattcgttttacgagtcgggtatcggtgttaggtagggttgtcgagtcgttattggatgcg

SEQ ID NO: 11190 - DNA, 206 bp, Artificial Sequence
  Description of Artificial Sequence: Synthetic polynucleotide
gcggcgggcggttggggaagtagttttgtggtttttcggcgggtgaggtcgagatagagattaatttttaggcggcgttttggcgttgagttcgcgttgaataagattttttcgtagttttgcgtttcgcgtcgggtgaaggggcgtgtttttgtaggcgttcggggttcggtttggagttggcggtcggtacgtcgtttttggcg

SEQ ID NO: 11191 - DNA, 1141 bp, Artificial Sequence
  Description of Artificial Sequence: Synthetic polynucleotide
tcgtagtttgggagcgcgcggtttcggggatggggagggggtcgggaggaggcgtgcggttttgggggcgcgtattgcgggagcgcgcggtggcgaggatagggcgggtcggggttcgcggggcgaaggcgcgcggtgttcgggggagggcgggtcggggcgcgcgggtcggggcgggggcgcgcgggtcggggcgggggcgcgcggggtcggtcggcgcgcgggggcggcgggcgcggcgttgttaatcgtagataaaggtcgttttagtgaattatgtggtgtcgggggaggaagtgcggtttgtttttttttttttagtttcggggttgtaggttgagcgcgatgcgcggagattttcgcgggggcggcggcggtcgtgagtttcgatgaggttcgagcgttttcggtcgcgcggtagcgttttcggttcgatggagatttcgtcgtgggatttagttcgtaacgattcgttgtcgtttacgttgatttcggtcgtgtttttttacgtgaagtttggttttatcgtcgtttatatcgtgttttacgcgttgtttttcgtgtttatttacgtgtagttttggttggtgttgcgttatcgttataagcggtttagttattagagcgtttttttttttttttgttttttttgggtttttttgcggatcgtttttttttttttttattttaaagatttcgtggcggttaattcgtttagttttttcgttttttggttgttttattgtttttttgtgtgtttgtagttttttatttttacgttgatgaatttgtattttacgtaggtgagttttagagaggtttttggaggcgtttatttggcggggtggttttcgcggggcgttcgaggtaggggcgatggtagtcgcgggggcgggttcggttttagggttgagagtgtagggagaaggcgtcggttttggggtcgttcgaattttgttttgtttgcgggtatttgttataggaaattttttgttatttttaaaaggggtaaggagaaggtaggggagggttggaggtcgtcgtttattcgttgtttttggtttcgtatcgtgcggtggattcggggcgttttttcgtgcgtagcgcgaagtagtagcgtttgtatacgttagttagtacg

SEQ ID NO: 11192 - DNA, 1819 bp, Artificial Sequence
  Description of Artificial Sequence: Synthetic polynucleotide
gcgtcgttcgtttttggtttttttgatagtcgtgttttattttcgttttgtgttttttttttcggatagtgttttttttagggtttatttaggagggtgtagcggtggttttcggggcggtggtcgtggtgggggtgttagttgtaggggtgttttcggtgggtgggagttggtggtttttcgttggtgttatgggattcgtatgttcgttttgcgtttttcggtttttgagtttataggtcgggattttgtttgttagtcgcgtgcgttgtcgtttaatttttgtaggcgtagagcgcgcggcggcggtgatagagaattttgtttggttgtttaaatatagttttttgtagaaggattttgcgttcggggaaggggaggaatttttttttttttgggcgttcgtttttttcgttatggttcggtttttatattcgtttatatttggtcgtagcggggcgttcggggggaggggttgaggtcgcgtttttcgtcgttttttgggcgcgggttaggcggggaggaggggggcgtttcggtcgtgtgtttaggattgttttttagcggttattcgggttttagttttttaggtttggttttgataggcgggcggagtagttagtgcgagatagggaggtcggtgcgggtgcgggaatttgattcgttcgggaggcgggggcggggcgggggcgtagcgcgcggggaggggtcggcgttcgttttttttttttatttatttagttgagttagggggtttaggggttttttcggcggttagttttgtattgtaggagcgcgggcgcggcgttttagttagcgcgtagggttcgggtttcgtcgggggcgttttttcgtcgttgtttttcgcgcgattcgttgtttattagttattatgtcggatttcgcggttaacgcgtagttggatgggattatttcggatttcgaaggtgggtgttgggttggttgttgcggtcgcggacgtgttggagaggattttgcgggtgggtttggcgcgggacgggggtgcgttgaggggagacgggagtgcgttgaggggagacgggatttttaatttaggcgttttttcgttgagagcgtcgcgcgttttcggtttcgtgttcgcgtcgtttacgtgggggattttgttaggggtattcgcgtagattttgcgcgtttttataggattttgtgttcgttttgcgtattgtcgtttgggtttttttttttttattgttgtttgtgtttgttaagcgatagcgattttttcgagggttcgcgaggttgtttcggaattttttaggacgtatagttttattttgggaaatttatcggttttttttttttggtttttttcggcggttttcgggtttcgtttggattcggtaacgggatagggaggtcgttttttattttcgattgagtggatagtcgcgttttgttcgggtggatagttttttttttttttacgttagtttcggggtcgttaagttgtgtagttcgtgggtcgggagtatcgaacggatatagtttaggtcgtggtagggtttagagtgggatgttttatggtttttatttaggtttggggatatttttattcgttttttagaatcgggtcgtgggggatagaaggggtttgcgtgcgggtagggagagtattttggtttttttttgttttcggggtttataaagtgtgttgggatttgcggggttgttttgtttaagtttgggtttggcgttcgcgtttttgagtttgtgagtgcgtgcgtttttttgcgtttttttgattgtcggtgttggggttttgcgttttgcgttcgcg

SEQ ID NO: 11193 - DNA, 1813 bp, Artificial Sequence
  Description of Artificial Sequence: Synthetic polynucleotide
gcgtttagtttcgagagtttattatagtttacgtttgggcgcgtagtattttttcgatattgtttttgttgtgttagatagtggtagtgttgagtttaggaatacgcgcggagttcgcggcgattttcgcggtcgtttagttttcgcggcggatttcggcgcgtaggagttattgggtcgtaagggcgtcggggagcgggaggggcgttgggggcggtaaggggttttagattttaggttacgaattgtttttttttttttcgggtaagagtttcgttttttttaattgatagaaatttattggggtaggggggcgagtggggagagaggtcgtttagggttcgttattggttgcgtttttttcggttttggtttgggaagcggttttgggtttttcgggcgagtagtttgggcgtcggcgttttttgcgaggaagatcgcggggtgacggtcggtattcgttcggttgggtcgcgttgtcgtttcgatttatttttttttcgcgttcgcgtttttttttttttttttattaggagttcgggattcggagagggcgcgggaggtaggtatacgggttcgattttattttagcgtttatcggggacgcgggcgggcggcgacgggacgcggcgggggcgcggggcgggcgcggttatggagtagtagcggcggcggcggcggcggcggcggtaatattagcgatcgcgggcggacgagcgggcgggtagggtcgtcgggtttagcggatcgaattgtatagtttagtaaaagcgttttcgtttttcgcgcgtcgttttttgcgagtttaaatttattaatattttttaacgttttaatttattttttgaagaaaagtaaaaaaaaaaaaaaaaaaaaaaaaaaaagtaaaaaaagaaaaagtattgatcggagagacggggatatatatatatatatatatatatatatatatataaaattttttttggtttttgttaaaattagtagggttcgtcgcgcgtttgtgtgttagtgtgtgcgagtgtgtgtgcgtgcgggcgtgtgtgtgtgaatgtgattattttaggatttttcgggtttcggagacgttatttttttttttgatatttttttttataaatcggtggcgcggcggaggcggtagagtcgggcgggaagcgcggggtcggtcggggcgttcgtcgttcgtcgtcgttttcgcgcgttcgggggtttcggcgtttttcgagttagggcggttagttcgcggttcgtcgtttgatagatgtttatcgttatggagttgtcgtagtagtatttttgggggttcgggcgagcgacgggagtcgggatttgagcgagcgtcggggttagcggagtcggagtcgtcgggatatgggtgagtacgcgcggcgattttggttcgggagttcgggcgtttagttttttttcgcgtcgcgggttttcgtattttcggaatcgggggcgacgtgtgtgttttgtatgtaaaagtttacgtcgttttgttgggtttttgattttgtattcggcgggaagggggagatcgggtcgagggggcgggatgtcggttcgggcgaggttgtaggagatgggcgcgatttcggcgggtcggcgggtgggcggcgatgttggtttaattggagtggttcgttggtggcggcgatggtggaagttttgggttggagggttgggagtttattgagtttcgtttaatttgatttatttttttttcgtttttcgttttttgtattttttttcggttttgtagtcggttggcggggttggcgggtttggcgttggtggagtggattcg

SEQ ID NO: 11194 - DNA, 1872 bp, Artificial Sequence
  Description of Artificial Sequence: Synthetic polynucleotide
gcgttttgttagttaagtcgggtagttagggatttacggagtaaagatttaagcgggtatggtttcgataaagagtgaggttcgttttttttttgttgtttcgttagttattaaagatgagtgaggcggaaatacgacggtggggagcgcggggaatggaaaagttagaaggtttcgtaataattcggtgttatttgaatgtttgtaaaacgtgtcggtaaaggtagttatgtttttatttcgattttggtttagttgttcgggatacgcgttacgcggcggtcgttaatatttaggggatagataatagttatattgtattgatagtacgtagataatatcggcgaggtgtatatttatatatttaacgataggtttcgttattgcgaggcggttgttaatttggagggaatagggaaagttagtcgggttttagtttttttttttcgaagtacgtttatttaaacgtcgtagtttgcgtttaggttgttttcgttttattttaaagattatgttaacgtaggaattgtgggtgcgcgcgggcggttcggcggggagtttttttttttgggtttcgtcggttttattttgggagcgggagggggaggagggagggttggaggaggggaggggaattttaaattaaaataatttttagttatgaggacgttcggtggtatcggatatttatattagtaatagttatattatattcgttttcgttagatggcggcgggtttaatttttcgggatttcgtaaatttaggttgtgcgttcgagcgcgcgtcggagtgtgggtacgcgggcgggttggggattgcgggagcggcgcggcgcggcgcgagttcggggcgagaacgggggcgtggggttggggggcgtcgggtttatcggtttcggacgaggaggttttcgttttcggggagcggtatcgggtagtttcggtttagggtgacggtttcgcggaagttggggtttagtcgggttattattagtttttgtatggtttggggaatggcggagttttggaagtttaggaagtggcgggcgtacgatatgtttacgatggttcgggtttcggtgggtattagtcgtagtatggtttgcgttttcgttcgttttttgcgtcgacgttggtcggggtcggttttcgttcgggtcgttcggttcggttgtgttttgttcggttagggcgggcgggttcgtttttttttcggtcggcgttttttttttggtttttttttttttcgcgtcgttcgttttcgtttttttcgttttttcggcgtcggcgtagttttcgtgaattcgggcgtattatttcgggtgtttcggtttggggatcgttgtcgtttcggtcgttgtttttttaatttttttgttttggtttgaatttgttcggcgtagattggttaaggatttttttcgtttttttttttttttttggcgcgggagaggtatcggatatttttatttttttcgagttttaaaagtcggatttgatttttttcgggtaagggtggcgggggggacggcgggtaaggggggacgggggattcgcgcgtttcgcggtcgtttgcggtttcgagtcggcggtagtttcgggcgttttcggagttgcgcggcggtcggcgtaggcgtttttttttttcgtgcgaagcgtttatttttttgtaaggtggtacgaattaatttcgagcgcggttcgggcggcggggtacgatcggggatttcgggtagggcggggagtttttgtcgtcgttgtcgtacgcgtattcgtatcgatcgcggggcggggaaatgtttagtgtttttcgttttttaggttggtggttttttgttttcggaattttttgcgcgtgttttttgtttacg

SEQ ID NO: 11195 - DNA, 652 bp, Artificial Sequence
  Description of Artificial Sequence: Synthetic polynucleotide
tcgtagatcgtgtatttttgtagggggtttcggatgcgatggagttgcgcgagttgacgttttgggttgggcggtttttaggttcgcgtcgtcgggcggggtttcggcggcggcgcgcgcgtgcgcggttgggggcgcggttttgcgggttgcgcgagttggaggtgcgcgtgagcgagttgggtttgggttacgcgttcgacgagacggtgttgtttcgttattgcgtaggcgtttgcgaggttgtcgcgcgcgtttacgatttcgggttgcgacgattgcgttagcggcggcgtttgcggcgggagcgggtgcgcgcgtagttttgttgtcgttcgacggtttacgaggacgaggtgttttttttggacgcgtatagtcgttattatacggtgtacgagttgtcggcgcgcgagtgcgtttgcgtgtgattttattttattcggtcggcgcggcggttatttttttcgtttcgacggtattattggtcggtttcgcgaaagattgcgcgtgcgtagagtacgtcggcgcggtttcgggattttcgcgataattgtattgagataaagtgtggtaattcgagttggttggtgatttattttcggcgaggggttcgcgtgtgggttacgtcgtcgtttttatcgggaaagcg

SEQ ID NO: 11196 - DNA, 722 bp, Artificial Sequence
  Description of Artificial Sequence: Synthetic polynucleotide
gcgtttatttacggcgcgtgtagggttttaggtttagggagcgagcggggcgttatgggggtcggagtttgggtttaggtcgttttttttttaattttttttgggtttttttatttcgcggtttttttcggagcgtggtttatcgggcgtgaagagcgcgatggttttgaggtagttatattcggtcgagtcgatttgtaggcggtttagtttgtttatttgtttttggaaggcgcgtatttggtttatgaaagttacggcgcgttcggcggttataggcgcggcgtggaggtcggcggcggttagtagcggcgtcgtgtgtaggggtagcgtcgtttgcgtcgcgtttagtacgaagagttcgttttagtttaggcgtagtagcgttatttggtcggttatcggtagttcggggaagaagggcgcgtggcgcgtttattttacggtgttgaagagtagtcgcgtcgttagttcgtatacgttgtcgatgtttagtatcgcgttcgtcgcgtcgttttttgcgtcgaagcgttcggtcgtcgtagggtagggtttagcgcgtagtagttgcgcgattagttcggatatcggttgtttcgggaagaggttttcgtcgttcgttattgtcgttagcgtcgagttcggggggttgttcgaggaggcggttacggtattaggtagcgagtgcgggatgcggtcgcgttgtatcgttgcgggaggcg

SEQ ID NO: 11197 - DNA, 858 bp, Artificial Sequence
  Description of Artificial Sequence: Synthetic polynucleotide
acgattacgttatcgtagattagggttatacgatagatttcgtttttatttatcgttttgagttcgattaaatagtatttacggtatatattagggttttcgttttttatatatatatattataatgacgtcgtaaataatagtattaattattatcgttcgtagttttcgcgtatagaggttttaggttttcggttttacgtggatcgatttcgttcggtagcgcggggttattttatcgcgagtttttttcgtagttcggttcgggttatttcgattcgttaggtttaatttaataattataatatcggaaaaggaagtaaaggtcgaagtttattcgcggttttgaggtttgtgggaaacgtagtttaataacgaaagagttttgaagtttaagcggagttcgttggtcgtaggggtcgtattacgttttagattttggagttttcgggtgcgtagatttttgttattagtagaggttgtcgttgcgcgttttttaggcgcggaagaggcggttggtggtttttgacggtaaggtgaagtcgaggtagtaatcgggaatttaggttgggaggatagaatggggaataggaagttggggcgagggtggttttgggggaggtggggggtcgcggaattttaggtggtttttgttttatttttggaaagaatcggaagttcgggtcggggagggtgaagggagtcgcggattcggttgtttagtcgaggaggaaattcggattttaggttgagggaggtcgaagaaggaattggagggtcgggttgggaaggtttgaagcgggtatagtttttaggttggggagggtcgaggggagaattcggagtttgagtcgggcg

SEQ ID NO: 11198 - DNA, 598 bp, Artificial Sequence
  Description of Artificial Sequence: Synthetic polynucleotide
tcgaggtttcggcgggttttcgtatcggttttagtttttttttcgtatttgtttggtcggcgggttttatttttttttttgttaggggtagattttgggattatttagttcgttttcgtaggttttgagcgtttgacgtttgcgtattgagcgcgggcgggcgggtatttttagaaattttcggggcgttgtaggcgggataagtaggttttataggtcgagtttacgagtttttcgaggggtgagcggttcgggttttttggcgttttggtcggttagttaagcgttggattatattttttagaggtacggcgttcggagcgttggattatattttttagaggtatcgttttcggagcgtagttttattttcgttagtttgcgagatttggaggtttcgcgtggggagagggtcgcgtttgtggaggagtttggtttcgtatttgttgggttggcgaattcgaaattgggtttggaattcgggagttagattttggattttgaattgtatttttgttaaggtaggagtgttcgggatgtcggagcggatacgcgcggagaaagcgtcgttggggttattcgtgtggtcgtgttttcg

SEQ ID NO: 11199 - DNA, 1281 bp, Artificial Sequence
  Description of Artificial Sequence: Synthetic polynucleotide
tcgaaagtttaaagtttcgggtttatcggttagttttttatttcgttgttgggtcggataggtgtaggggaggcggattcgtttcgtagtcgatttatttagttttagggtttggtcgtatttgagtagcgcggttttcggttgttgttggcgttgtaggtttcgcgtttggtttgttagtttgcgtagtcggtattcggtcgggaagtatttttttagtaggtcgtttagtattacgtttacgcgtcgtatttgcggtcgcgcgggttttggttttacgtagcgtttgtagattgtgagttcgtagggtagcgttatcggtttatgtagtagtcgtcggtagcgcgggtagtcgagtaggtcgcggggcgcgcggggtttcggggtcggttttttttcgtcgggcgtttcgggttcgtcgttcgggtttttcgcggatagcggtcggtcgcgtaggtttacggcgcgtattaggtcgttcgttagtttttttagttttttcggtcgtagcgtttcgagtcgcgcggcgtcgcggaacgcgtttagggtttcggggaggcggtcggcgcgggttagcgcgttttttagttttaggtataggtcgcggttcggttgcgttagttcggttagtatggagcgaaagagttcggttgttatttcgtagtcgttcgcgcggaaggtttcgtcgtttttttttaagcgttgggcgatcggtttcgcgcggtcgtagttaggatattggggcggcggcggcggcgggatcggttcggggtttattatcgcggggttgcgacgacgcgggttcggagcgaaggcgcggagtagggaggatgcgttgttgttgggaattggtcggcgggagcgcggttttagttttcgttagtagttacgcgcgtttgggggcggcgcgttgcgagcggttgagatcgcgggcgggggcgggcgtttggtttgggtagcgtttttagcgcggtgtgggcggcgagtttcgtagggttgtaatcgtttcggggtgggggtcgggataggtatcgcgggcgtaatttgagtttttgtttacgcgtagcggttttttagtttcgtcggtttaggtaatttaggtcgttgcggtaacgtagtgatcgcgttttaggttcgcgttttttgcgatgttttttttattcgtttgagggtttttgcgcgattgcgcgcgcgttttttgtttgtcgttttttcgtagaggtgtcggggttttgggagtaggtggttttggtcgcgggttgttggcgcgtcggtatcgcg

SEQ ID NO: 11200 - DNA, 1788 bp, Artificial Sequence
  Description of Artificial Sequence: Synthetic polynucleotide
tcggttaggttcgtcggtcgttttagtttagtattagggcgttcgcgcggttgttaaatattttcgggagttttgttcgtaaagggattacgaggtagttgttggcgcgttttgcgcgtattcgtttagaggtttttcggtttgtttttcgcgggtttgtttcgaaattgacgtgaaatcgatttggtgtaatgcgaatgagttttcgttcgttttcgtttttattttagtcgtcgtcgtcgttcgtcgttataataatcggtttttattttttttattttacgttttgtttttcgggtttttcgggttataggttatagcgcgggaaggcgtttcgttttcggcgtttcgtattcggtcgtcgcgtattttcgttcgttcggcgttttcgagttacgtagaggcgttttttttcgtcggagacgggaaagtttcggcgtttttagattgggtttcgtttttagttttcggaggggttggggttttttcgcgtgcgtttcgtatttgtcgggggttcgtattcgttttcgtcggggttttagggggtacgacggtcgtggttcggcgtttttgggaggggagcgggatattttcgaaggcggcgcgttggaggcggggagcggtcggggcgtacggagagggcggggagttcgcgggagggggaggagggggaggagggggaggaggcgcgaggtgggggggagcgcggcgggcggtagggagggagcgggagggaggtaagaaagtagtagaaagtgaggttggtaggcggcggtaaaggagtcggcgcgcggcggcggtaggaagtttgtgttcgagaatagtagaaataagagttagggagggatcgcggtcgcggcggcggcggcgagagcgaaagaggaaattgtagaggaggaagttgcgtcgtagttcgagtcgttcggtattttcgtcgtttttgcgttcgcgtcgcgttttcggcgttttttttttagcgcgttttcggtcgttttttcgcgtcgcgttcgtcggttatggttcgggagaacggcgagagtagttttttttggaaaaagtaagttgaagatattaagaagattttcgagtttaaagagattttcggaacgtaagtggggatcggggaggcgagggtggaggtggtcgcggtaggggttgtacgggtagttttagttgtcgtcgtcgttattatcgcggtagaaatttagtttgttatcgcgtttttattgtttcgttttcggcgttgcggagttttttcgagcgcgttcgacgcgtgggtttgcgattttcgggtgggcgtcgttttcgggagggggagggggtagcgtcgggttgttagggagtagtttacgcgggcgcgcgattttttattttttttgttatcgtcgtttttttcgttgttttttttttacgcgtgattgtgggttgagtatggtggggatggttgtttatcggttgtgtgcgtttattcgtcgtgtgtatgggcgtatcgcgttggcgagacgtggttacgagaagattagtttttagtcgtttttatttttgtttttatattatgtatttttatggaattggtatttgtacgtacgaggtgtaggtaagattttgggtggttacgcgaggatggaagggaagggtttcgtagtgtttagggttatacgtgggtagagttttatcggagggtttgtgtattttacgcgggttcggtcgtacgcgtcggggagcgcgtttttaagggagggtttgtgcgcgtcgttgcgcgggcggtgtttttttcgggttgtatcg

SEQ ID NO: 11201 - DNA, 626 bp, Artificial Sequence
  Description of Artificial Sequence: Synthetic polynucleotide
tcgttcggtttttcgcgtagtcgtgggatttcgaggagggcgtttattaggtcgcgtgtgattatgtaaggtaaatagggggtttatgaagttattgaggattaatggggagttcggagtagagtttggggcggggtttggttttggcggcgggcgcggattggtacgttgcggatttttttgttgttttataaggcggtgcgaggcgagttatttttagagggttatataagggggttgaggcggtcgttcggcggtcgggtagcgcgagcgtaagggatagggagggtcgtggcgatattcgcgttagttttcgggacggttgggttcgggttggtcgtcgattttcgattttttattagatgtttggtagagttcggcgcgttcggagttcgcgttttttagagggaaggggtcgcgcgtcgtcgcggcggttttgaggttgacggtcgggaggtgaaaggtcggagtgcggggttaggacgttttttggagggggcgcggcgtagggggtcgcggggaagtcgtcgagggcgcggagcgggaaggaaggatagtggttatttcgttttcgtttgggtacggggtagggattcgcgcgaggcggtgtcggggaggtttttacg

SEQ ID NO: 11202 - DNA, 1037 bp, Artificial Sequence
  Description of Artificial Sequence: Synthetic polynucleotide
acgaagttttcgcgaattgaattgagagtagataaaagtacgcgtttttttttatcgttacgtcggttttatttaaattcgcgagttattcgtatttttttttaggagttatagttaggttagaagagtgcggagggacggggttcgggaagagtagggaatttttagagttcgtagttaacgcggaggtgggcgagcgggcgtgcgcgtatttatttgtcggcgcgagggagtgtcgggggggaagggagtggtttttaaaagggggaggggagaaggtagggggcggggagaagtcggttttttaggattcggttgcggcggcgagggaggaggaagaagcggaggaggcggttttcgcgttcgtagggtcgtgttatttgttcgttcgttcgttcgttcgttcgttcgttgcgtcgcgttgtcgatcgttagtatgttgtcgagagtgggttgtttcgcgttgtcgttgtcgtcgtcgtcgttgttgtcgttgttgttgttgttattgggcgcgagtggcggcggcggcggggcgcgcgcggaggtgttgtttcgttgttcgttttgtatattcgagcgtttggtcgtttgcgggttttcgtcggttgcgtcgttcgtcgcggtggtcgtagtggtcggaggcgttcgtatgttatgcgcggagttcgttcgggagtcgggttgcggttgttgttcggtgtgcgttcggttggagggcgaggcgtgcggcgtttatatttcgcgttgcggttaggggttgcgttgttatttttattcgggtttcgagttgtttttgtaggcgttggttatgggcgagggtatttgtgagaagcgtcgggacgtcgagtatggcgttagttcggagtaggttgtaggtaacgcggtttggaataagtagttgggagaaatttggagggtagcggagaagttcgacgggcggttggattttacggacggttttaggggcggtagagtcgagattttggattaaattaagggggattgttgttagcgggacgcggaagttaggttcg

SEQ ID NO: 11203 - DNA, 977 bp, Artificial Sequence
  Description of Artificial Sequence: Synthetic polynucleotide
tcggatttgacggagtaatgtacgtgggtttttgattcgtaatatatttagttaaagtcggtttttattgttaagcgcgttagtagtttatatttattgcggtcgcggtttgatgtggtgatgtttatcgcgcggtttttataatgtagggatttttttgagtggtggtcgttttcgttttagttttcggttattcgtagttttatatcgggttattggtttattatcgagatagttagcgagtttaggcggtttttgtagcgttgggagaggaatgtgcgcgaaattaattagagcgaaattagtcggaggagtcggtcgaggtgtaggtgtaggcgtagtttcgtttagaattttttcgttatatttaagggagttggaagttcgggagggtgttgttttttttttttaggaatagagggttttgaagtgttttttttttagtatatagtcgttttcggggatttggatcgtacggcggtattataaatttggaggaggtatggaggtaagcgttttggcggcgtttttattggtaggtggaggtttttttttttttgtgttgtttttagtttcgggtatttatttttttatagataggattatattttttagcgttcggtttttttgtgtttttaaggtaggagggttagttagcggtcgggagggaggagtggtagtagagtcgattgtttgcggtcggtttgcgaggcgtgtaaggttcgaggtgtttagtaggtgttatcgtagttttagggttgaggtttggggacgataggttttggaggcgcggtaggtgtagagcgtttcggtagttttagggggtgtgttggaggggaatcgtcggtttgtttggatttttcgagtattatcgaggattttcgtcgggatttttttataattttaaatcggtttataatttcgttagagatgatagggttagggaattagaaatcggcggattagcgttagggtcg

SEQ ID NO: 11204 - DNA, 6206 bp, Artificial Sequence
  Description of Artificial Sequence: Synthetic polynucleotide
tcgtttttttgcggtaggcgaggcggggtgtaggtgtgagtggggtgggaggaaggggaaaggatcggggtcgtcgtagtttttttggttagtttcgttgggttttgttagtttcgtttgagatcgaggcgtacggattagcggtcgttagtattttataggtggaggatattttttgcgttttaaggttaatgttatttcgatgggtttcgtgtcgttttgattttttttgatttaattttttggttatgatttttttattttttgggtttcgtttttgttagttttcgtcgacgtcgtttttttcgtcgttcgttcgggtttttttattcgtttttttttttttttggttcgacggttttattgaggtaaaaataaatagttttgagggtattttaaggagcgtgtagtggtttcgacggtattttcggggggataaaagaggtggttagttacgtcgtcggttttcggtcgaataatgggcgcgtagtagattgttagggggtatttgaaattcgaggggagggaaatatttgagcgcggttttttttcgcgaggacgtacgacgtagtttcgcggatcgttttttgttcgtttttttttatgtattttttttttgtgtggaattatttaaacgggagatttttggtagttttatgttaatgcgtcgaataaaggtaacggttcgcgggcgggaggttcggaaggtgtttggggtcgggtcgggcggggtggcggttaggcgggttgcgcgtgtttttcgcgtgtttttgggattgatataataattttttatttttgtaaatataaagttttttatcggttcgggtcgggcgtattcggcgtagggaggcgttggttttttcgggcggcgggtattgtagcggtaacgtacggtttttgtcggttgtggttcgggggattgagggtcgggagtgggggtttttgtgaagttagaagagaagtttgtagtagagtggtgatgaggggcgttgatattttatttttaacgtcgacgtttttaaacgcgatattttttgcggggtgagaatgcgggttcgttcggtttttttcgtgaggttagggttttttgtttttttagatattttaaggagttaattttttcgtagaagtttttcgtttttgtttttatttttaagtttcgcgttttttataaattttttgttgttttgattttgatttttagtcgtggtgagggttagagtgaatttcggcgcgtttttcgacggtattttcgtatattaggataggagaaattggagggtttggggtttcgggtttcgtagtcgtcggaggaagaatttatcgcggggttcgtaagggaaagtgaagaggttcgggatttttttaaagcgttggttaggatttcgaaggaaggggaggagttatttgaagtcggggaaggttttttgggtgttttgttttggatttttatgtttattgattttcgcgaagtttttttggaggggggtaaattcgcgttgttttttttaatttaattttacgcggtttatttttcgaatcgcgtgcgttaaggtcggcgtcgggggcgtattgtgatggcgttttgttttttttaggcgaagataaatatttcgattcgatgtttttatgtatgcgggtgtataggttttgagaaaattacgtagaaggcggttgcgatttacggttcgggttgggttatatttgtttggaggtcgttggtgtgtgcgtgcgcgcgtgcgtagtttaattttttttagtttcgggtggtgaaattagtttttaatattagtattttttaagtttttatttattttgattgtattcgtttgaaagtagattttatttacgttagtaagattggaagttataaataaagaaaaagaaacggatttattgaattttagtattttagtagcgtttaatagatttttttggttaaatttagagttttgtttgaatttatttacgtaggagttgttttgttttttttgttggtagaggtgtcggttttttatttttacggtttatttataattatgggtgttgttatttttaaaggatttataaggtgattaattttttgttatttgttgaatggaaggagtgttatatatgtaagatcgaatggggtaggtcgagttttcgttttatgttattttataatttagatgggattcgtgattagaaaataaaattggttaaagttgtttcggaattttttttttatttttaattttattagtattattaattagagtttaaaagagtaaggaaataatattagttatttttagatagaaatatgtttataaattttagataaatttattttaagatttttaatttttggggagattagtatttattatagtatttttaaaattagggtgagattttttaaaatatattttattatatgtatttttttttttttagtgtgtgagttaaaatattataaatataaaattattaaatattttttttttgattaattaatttgattaattttttaattaattaagtttaataattgtttttattataatttatgatttatgtggattttatttttatatgtttaatttttacgttagggtatttttagagggaaaatttaaaataattaaatatttttagtggaattaagcgtaagtaaaatttagtaaaatttgtttggtatataaagttttgtagaaaaatgttttttttttttttaataaagtgatattttttttatagtatatgatattttatgtggtttggttatttgttttttagtgttggacgattagggttattacgtattcgtggggttttttgttttgtttttcgaagattttgttttttgtgttttttcggggttgggttggatagaggatggaggtaggcggtttagtttgggtttaaacggaacggtagtggaggtgggggtgggggtgggggcggggggaattttcgttgttgtttttttttggtggtataggggaggcggtttgttttttcggaggttttagtttgttttagagtatagattgtttttttttttttcgtttagtacgcgttttttttgcgtttagattggtcgcgatcggagtttaatagtaggaggttaattttttttataaaggtgaagggggtacggtttcgtgggggttgcgtttagataggtagtttttttatttcgtagcgttttgattggagtttttgatttagtatttgatgttaatcggtaaataaaatgttcgttcggaatgaaaatgtatgaggtcgcgcggggaggagaaagttaattttattggggcgtacgaggtcgatcgcgcgtttcgggtttcggttaattcgattcggattaatcgagttttggattacgcggaagtttcgggcggtttgggtcgggtttcgttaaagatgttatttttaagtttttaagaatttaaaagtttagaaatttacgtttttttgggaatttagtttagttcgttcgcgttttaatttcgcgttttcgggagattgagaaggtcgtgttaatttttttttaaattcgaaagaaattttttttagtttcgtgggcgcgcggaggttgcgagtataaatatcgttttcggttattgttagaaggtcgggttttttgtttatatttggaatttcggggaatttttttgtttggttttttgggtttagcggtttattcgtttaaggttcgggcggaggtcgttcggattttgttgttttttcggatttttgtttattttttaaatattacgcggagttattgcgttttcgtaacgatttttttcgtatcgtttcggcgcgttttcgtttttatttaattagcgcgtataatttttttttcggtttcggttcgcggattgaatttttttgatatatttggggttattttttttttttgttgttattttgttagcgattcgcgggtaattttcgcgcgggaggggggcgtgtattgtcgcgttgatggacgggtttatttggcggtttcgcgtttttcggaggagagatataaagtttaggtacgtgcgtttttttatagagaagtagtagatcgtgaagggaggcggggtcgggcgtgtgtttggatcgggcggggcggcggcgtcgggcggggcgattaggggcgcgcgcgggggtttcgcgtttttaggtatatttgtcgtatttatcgggcgattttcgagtttcggtttttttttggtcgttttatcgtttttttattttgttaggttgaggagttgcggacgcgttgattggttttaggggaagcgggaggcgagaataatggtttttttttttcgttaaaagggagcggttgtcgggttcggggatagggacgcgcgtgtagggcgtagagttgggtcgagtcgtcgtcggcgttacgcgagtttcgtagtcgtcgcgttcgggtaatgggtcgggggtattgagggtcgtcggggtcgagcgcggaggggggatcgagttagtgtcgtgttttcgggtcgcgttaatatgtttcgcggttttttggtgaagcgtagtaagaagtttacgttcgttttttatcgggttcgcggcggcgaggacggcgatcgcgtattgttgttttcgtttagttgcgggggcgttcgcgtcgagttttcggcgtcgagttcggttttcgggtcgttgtcgtcgtcgtcgttcgcggagcgcgtttatgtagcgttcgtcgtcgcgtttgtttgcgcgtttgggtcgtagttattttcgtagggttcgcgggtcgcgtatttcggtaatttcgaggttgcgtatttcgcgtcgttttatagttttacgcggttcgtgagtcgcgagtacgagaagtataagtatttcgaacgtagttttaatttgggttcgtcggtttcggtcgagtttttttttacgttcgtcgcgttgttcggagggggcggcggcggcggcgcgagcggagttggcggaggcggtatttgcggcggcgattcgttgtttttcgcgttcgtcgagtttaagatgggtacggcgttttcggttggcgtcgaggcggttcgcggttcgggtttcggttttttattgttttttgtcgtcgttttgcggttttcgggaaagcggttttcgttttttatcgtcgcggagtcgttcgttaaggtagttaaggtttcgggcgttaagaagtttaaggttattcgtaagttgtatttcgaggacgaggtgattacgtcgttcgtgttggggtttaagattaaggagggttcggtggaggcgtcgcggggtcgcgcggggggcgcggcgcggtcgttgggcgagtttatttgttagttgtgtaaggaggagtacgtcgattcgttcgcgttggcgtagtataaatgttcgcgtatcgtgcgtgtggagtatcgttgtttcgagtgcgttaaggtttttagttgttcggttaatttggtttcgtatcgtcgttggtataaatcgcggttcgcgttcgtcgtcgttcgcgcgtcggagttagaagtagtagttagggttgaggcgcgggaggtattcggcggcggtagcgatcgggatacgtcgagtttcggcggcgtgttcgagtcgggtttcgaggacgggttttacgagtgttattattgcgttaagaagtttcgtcgttaggtttatttacgtaagtatttgttggcgtattattaggcgttgtaggttaagggcgcgtcgttagcgttttcggtcgaggatttattggttttgtatttcgggttcgacgagaaggcgttttaggaggcggtcggcgacggcgagggggtcggcgtgttgggtttgagtgcgttcgtcgagtgttatttgtgtttagtgtgcggagagtcgttcgttagtaagggcgtttaggagcgttatttgcgtttgttgtacgtcgtttaggtgtttttttgtaagtattgttcggttattttttatagttcgttcggttttacgcggtatattaataagtgttatttattcgaaaatagataggtgatttttttgtaggtgttcgtgcgttcggtttgttagagcgcgttttttatttcggttttcgaattgtgttttcgtttggagatttataaagagagtgcgttttgtatttttcgaattcgagttcgcgttgggggagtttcgttttcgtttttatcgggtgaaagtgtcgttttcgtttttttcggtgtggcgtgacg

SEQ ID NO: 11205 - DNA, 574 bp, Artificial Sequence
  Description of Artificial Sequence: Synthetic polynucleotide
gcgtttttttttttgttcgcgttttcggttttttcgttggtttttgttcgagtttttagtttttttgtattataggtttttggggtttcgtttcggattcggttattttttaggttcggagtagtcgtcgtggaggtcgttttttcgcgtttaggggaagggaaggcggtttcggggttcgttgcggggtggagggattcgcgttttttagtttttcgggttcgggtcgcggggatcgtgcgcgcgtttttttttcgggtaaggtcgggcggcgggcgcgtcgcggtttttggggttttcgtttttttgttcgttatcgtttgcgggagtttttggtttggaggggttcggggcgcgttggcgattgcgggttcggcgataggggcggttggtggcgggaggatagtgggaggaaggtttcgttttacgcgtttttttttcggatgtgattcgtcggggtttttcgtagtcggggcgagcggtttggaagttcggaggaggggtacggaattgttcgatggggatgcgatcgcgggcgttagacgaattgtttttatattcgttggcgttggcg

SEQ ID NO: 11206 - DNA, 3438 bp, Artificial Sequence
  Description of Artificial Sequence: Synthetic polynucleotide
tcgttggtggagttcgtttttttgaagtcggagttggcgagtttttcgtatttgattttgtaggcgtttttttcgcgggttagtcgggatattttttgtttaagttgttttatttgttgaatgagttgcgtttttttattttttaggtggtgtttttgttggacgcgtttatatttgtaagattgggcgtagtttcggttttttagggttcgtcgtttttgttttaggcggattatttcgtttttggtgaagtttcgtaggtggcggtttagttcgcgtacggatatggatacgagttggtcgtcggagaagcggttttttacgttgtcgttgtcgttcgtcgtcgtcgtcgaggtcgtcgcgtgcggttcgggttcggggtggttagtgggtagttgttgcgtcgggttagcggcgttggacggcggcggcgacgtttggtgatgatggtgatggtgcgggtgagcgtgcgggtttagttcgtcgtgggttacgtcggcgttcgggtacgtgtggtgcgggtgagggtggtggtgatggtggtggtggtgagcgtcgcgaaagttgtcgaagttttgtagcggttgtggtattgggtgcgagtcgatgagcgtttttatcgcgttttcgggcgttaggttgagcgtttcggggtttatttgttggtagttgttcgttatttagtatagattttcgaggtgtgttttttgttcggtcgggttgaagttgggcgacgagggtacggagttatacggagtgttgagcggtgtggaggatatcgagtcggttggttgtaggcgtgtgtagggtttgttcggacgtttcgcgcgttttagtggttttttttttacgtcgaatttgagtaggtcgaagtcgttgatatattttatggttagcgggttggtgggtagttttggttttatgtttagtttcgcggttatcgttgaagcgaggcgtagtcgtcgttgtcgttcgggaaattttgcggtcggtcggagcgcgtcgagttaagcgcgggggggaagagcggagaagagttggggaggcggggagcgagggcgtagcgggtcggggtcgtcggttaagtttttgtttggggacgcggcggcgcgtcggagagtttcgaggttgtttgtatcgttttagagttttgggttgtgttcgcgtagggatcgggtcgggtagagtcgggcggggtggagaggtaagcggagcgcgcggtggggttgaggggaggcgtggggcgagtgttcgttgttcgttttttagtttttttgtttttacgttttttcgttcgtagtcgttcgtagttcggcggtgtagttgtgttggattcggcggcgtcgtagttttttatcgttttttgatgttattggggtgcgggggttcgggcggttcggtgcgcgggttaatagttgtacggttttcgcggtttagcggcgtagggcggggcgcgtttgatagttttttcgtttttcgcgttagttgattggcggttcgagcggtttcggagcggcggaggtttggcggagcgttggagcggagtgggacggttagtttgggtttattttcgtattttgtaggtttcggtttacgtacgttcgtttggagtgcgcgttttatttttaggttaaattatcgttttttttttttcgcgtattttttttttttagttttttttgtattttatttttatttcgtgttatttttaaggaggtttagaatgagcgtcgggataacgttttttgggttttttgtttttaagcggttttcgtttagtgggcgacgttttgtgtgttttcgcggtttttggtcgtgtgtgtcgtgcgtttttgtttttggagatttgcgcgtatttgtatgttggggagggcgggttcgaggtttcgagagttgtgtttagatttaatttttaattttaggggattttttttaggttaagcgagggttttttttggcgggtgtagtcgtagagttttgaggttcgattttattggtttcgtcgtttttcgcgtttattttatcgtataatgtttatagtgaaggcgacgggaaaagtagtagtttaaaggttttgaatttttttttttcgttatacgtacggaattttgagttttcggagtttcggggtcgaggtcggttcgggacggtgtttcgagtagttttttattgttggggagtcggttttgtttttgtttgaacgttttgtaacgattaagtagatttcggcgttagttcgtcgcggagaggtttaaataggtataaagtgcgattttaagtggttattgtgcgtaaaggcgtcgcgatcgttcggtttacggtcggaaggtttggacggcgtttcgtatttagttaggttttttttatttggtttaatttaagttagtttagaacgtatattatgtgtgtattagagtttaggataggtttttttcgagcgatgtataggttttcgggtttcgttttcgtatttagtcgcgagtttcgagtcgcgagtttcgttttggtcgtttcgttgaaatttcgtgttttagcgttcgggggtgttcgtcggttgttttttgggtcggaaggttttgggcggaggaaggtcggtagttaaaagtggaagcgttatagtgaagcggtttagggttatcgggtgagaaattttttcggagggtagacggggagatcgaagtatatcgtattaggtatttagattgggtttgggagtcgcgtattttttttatttagatttaggatggttagaattaacgggttttttttgagatttcggtttaggcgtcgaaatcggatagatcgcgaattcgttggattcggagattcgattcgtttttcgcgttatttttttttttttagttttgggcgcgcgtagcgaaaggtaggagaggcgcgtattgggtgagtgagtttcggtcgttgtttgcgttggattagttcgattgatttcgcgcgtaggggtcgcgtgagttatatcggtgtagacgcgtttagattatttttaaatgttagaaggtaaaatatttgtttttaattaatttgaaaattttttatttttttgcgttttcggagaggttggggtacggcgtggtattgggtcgtttatttttaataaaatgagtgtattttaattaaaatttaatttaattttgtggggtggtaaattaaatgttggaagagcgcgtttataatttttttcgagaagcgtgtttttcgtagaaatgagtcggtcgtttggagagagagtttgggcggtgtcgttgcgtagtttttgttagtagttgggggttggggattcgtattttgtaaatgttttcgttttgtttgaacgtagtgagagtatattcgtttttagattattcgggatcgggtgtttcggatttgtgtagattatgtatggtttcggttttaggcggttagggcgggataagtacg

SEQ ID NO: 11207 - DNA, 4088 bp, Artificial Sequence
  Description of Artificial Sequence: Synthetic polynucleotide
acgtttcgagtatcgattttatagttacggttatcgtttttcggttttcgtgatatcggcgcgtttgttgtttcgagtaggggaggttttgtatttttatcgtatttttttcgttcgaagatacgaaatttcgttcgggcgtcgtaaataattcgaattcggttttttgatatttatttcggcgggcgcgcgtcgttgggagggcggggtgggtggttggaggtaaggaggcgtatagtaggggtaagcgtcgtcgtcgtatattttgtacgtcgtttagggttatattatttatcgaaaattgggaggtaggtttgggaggcggggttgagcgtttatcgttttgggcgcgttcgcgtttttcgttatcgcggttttcgcgttttcggtttacgttcgcgcggtttcggtatcggtttgtatttttagggtgcgcggcggtttatttgggtgcgttttcggtgggtcgatttttcgcgtttttttttcggtttataggggtcgttgttatgggtcggttttttgaagaggttggggcgttatcggggtcggttagaagttttgtttttcggcggggatatttagtcgcgtcggtatcgcggagcgggttgcgttaggtggttggtcggcgcggcgtttttttgttttttggtttcgggttgcggcgcggcggttggagcgagtttttgtttcggcgcggggcggcggcgggcggtcggtaggcgttgttttgcgtgtgagtgtattttatttatatgtaagtcggggagcgtcggggtttttcgcggaagtgcgagtcgttcggcgtaggtaagagtcgtcgggttcgggataaggtaggggcgttcgggcgtcgttgttttgtttcggggcgttttcgggtattttttaattttttttttttttttttttttattggcgtgtttaagagttaaattaaggagcgtttgagggtaaatagatttttgttattcgcgtttttgtatttttttttttgagttgatattttttggtgttttttggtttttcgttgttgttgggtgttttttggtttgtttttgtttttttttcgtttgtttattttttttggcgttaatttttaggtagttagtttagtagttcgaagttcgggtagtcgcgtttcgcggtttcggggtagcgcggcgggaatcgtagttaagtttttcgatacggggcgtacgggggtcgggtagttcgaggtcgggggtaagtagggagttcgggttaggcgcgagtcgagtttttcgaggtggtcgggttattatgttgaagatggttatgaagtttaaagttcgggcggcggagagcgagaagaagacggtcgcggcggttgtcgaggtggttgtcgaagttgcggcggcggttgcggcgttggtcgagtcgagagagtcgttcgcgtcgcggaagagcggggatttcgagaagttcgcgaagaattttaagaattcggcgcgggaggcgtttttcgaaaagtttttaatagataaggagcgtaagaagttcgagaagaagttgttggagtagaggcgaaaggaggagaagaagaaggagaaggagaggaagaagatggagaagatgttgaagaagaagaagaagaaggtgttagaagtttaggaggaggttcgatgtttcgaggtcgtcgtcgtcgcggtcgtcgtcgacgacgatgagggcgtcgaggagggcgtcgtcgggggcgtcgaggagggcgtcgtcgtcgggggtacgagtagggtttgggttgattgggatacggattcgagcgacgaggacgacgtttattacgcggcgtcgcgcgttgggggtatcgtgtggcggttcgggtcgtttaaggttggcgcgttgagcgtttatttgtttttcgtggtgtttttggttttttcggtgcgtagtttttcgtgggtgtttaattttttgttgtagaagcgtacggagtagggtcgcggttgcggtttcgtgttcggggcgatttgttgttttcgagtgtttttgggttgcgttttttttttttatttgggcggtcgcgttaagcgtagaggtcgcgggcgtttcggggttagaggcgttttcggttcgggttatggcgttcggcgtcgggggcgcgaggagcggtttatttagttagattttttatttcgttatcgttattagatattattatcgttgtgtagtgtgggtttttattcgtgttcgtgtgtgtgtgtggatatattttttttttcggttgttttgttttttggttcgtgttcgtttcgttttttttatatttttgttttttggttttttgtgtttttcgttttttcgaaaatttttttaagttcgggcgcgcgtttttttttttttcgtttattttagtttttcggcggcgttcgcgggagggggaggaggtttcgggggcgtcgggcgacgcggttcggggggtggagcgttggcgtcgtgcgaggggtcgttattggcgcggagacgtttttttttttttttcggtttagtcgggttgttgttcgagttcggggggtggggggcgttttttcggttcgtttcgttttcggtcgggcgcgggcggagggatttttttttcgggttttcggggggtcgttttttttcgtcggttttcgtttttttagtcgtcgtcgtcgtcgcggtcgtttttcggtttttttttttttttttttttttttatttttttcgtcgtcgtcgttttttttttttttcgttttttttcgttcgtcgcggcgtttttggttcggggcggcggcgggggttcggtcgaggtaataagagcggcggcggcggtagcggcggtagtagttttcgtagtttttgttttggttcgtttcggttcggcggcggttattagttttttcggtttcggttcgaggggcggggagttgcgcgcgtttttcggttcgatcgatattttttttttttcgttcgttcgcgcgtttcgcggttcgcggttcgtagttcgtttcgcgcgttttttgtcgaggagtcgagttcgcgttcggttcgttcgttcggcgttgtttcggttttttcggtttgcgtgaggtcgttcgcgttcgtcgtcgtcgtagttcggtcgcgtttcgtcgtcgtcgtcgtcgttatgggttgtttcgggaatagtaagatcgaggattagcgtaacgaggagaaggcgtagcgtgaggttaataaaaagatcgagaagtagttgtagaaggataagtaggtttatcgggttacgtatcgtttgttgttgttgggtaagggcgggcggggggcgtcggtttcggttcgggggttttcgaagggcgtttcgtaggtcgcgcgcgtcgagttcgtttttcgtttcgggcgcgcgttttcgagtttttcgttcgttcgcgggttttgtttgtggggggcgaggtcggaagggggatttaggggcgcggattcggtcgggcgggggtttaaaaacggggcggggggtcgtggcgacgcgggcgcgggtttttttttttcggtttgttcgtttagtgttttttttttgttttcgttttcgtttttttttttttttttttttttttttttttttcgcgaggtttatacgacgttaggggtttgggtgcgtgttggggagggggagggggagtttatggggtttcggagattgcgataaaaagagggtttcggggataggaaatcgggtggcgggtagagggagggggattcgttttcgtggggtgtgagatttgttgggagagggaaagaggggaagaaaggggcgaggagaggagggggtgacgttggggggcgtcgtggtggcggagggggtttcgttaaagggaggttttggcggggagaagtggtcgaggagagtgggggggttggtgatattagtttttcggaaaggatcggagcggtaaaggtggtgtagtgggggggagggggcgtaagggagtcgtggcgtcggagtcgggaggggggcggcgaggggaggagggagggcggttgtcgttgggcgcgatttggtgcgtttcgggtaggatcgattgattgtgtgtgcgcggagtagacgtgtttcgggttaggtcgggtcg

SEQ ID NO: 11208 - DNA, 522 bp, Artificial Sequence
  Description of Artificial Sequence: Synthetic polynucleotide
tcggttttatttcgtttaaagtcggatttcgtttagtttcgtgaaagcgaaggagtattagcgttttttgatttcgtatagttttttcggtagagacggttcgttttttttaagaatcggaagtcggatagcgttaggacgttttattttttttatttgggatttagagaggtagcggttaaggatagggttttcgtcgaggttatcgggtagcgtttaggtttcggtttttgggaggggagtagcgggggaggggtacggggaggggcgagggcggggcgcgtttgggtttcggcgttgggttttttttttgttcgtttcgggggatatttataggatttttgtagatttttgtcgaggtaggatggaggtttgtagggatgtatcgcgggttcgcgattcgggcggtcggaatatagttttttttggtcggagatcggttcggtcgtgagtcgtgtttgtgttaggttttttacgttgtgttttagggttttagtgttcggcgcgtcgggggttgtatcg

SEQ ID NO: 11209 - DNA, 2260 bp, Artificial Sequence
  Description of Artificial Sequence: Synthetic polynucleotide
acgttttcggaaagttttttttaatgggaagcgatttcgtcgttgagttaagcgttcgaattttttttttcgcggtagggatatcggttcgggttaggtttgcggaggacgttttcgggcgcgtatatatagttcgaggacgcgttttgtattttaagacgtagggtcggattttatttcgaaatttggtttttatagttttaggtcgaattgtgtttggtttttagttttcgagttcgagttttacgtcgtaaagagatggggttttattgtgtttagttggttttttagtacggacgtgtatttttttttggtttgttttttgttaaaaatcggtagtgcgtttcgtttttttgtttagtcgtagtttgtcgttttttagataaaaagcggcgatcgcggttcggttattcgagtttcgtcgcgttgcgtttttgttgggcggtttatagatggtgtttagtacggggtcgcgtcgagggcgggggcgggaggtcgcgaagagggtcgggcgggaggggaggagacggcggagtagttaattcgcgcgcggtttattagttgatcgtttttgtttatattaggtgtacgtcggttgcggggagtataaagcggggcgtatcgcgggcgtcggtaacgagtcggtgaacgaggcgaggttcgtgcgttcgcggttgtaagcgttcgtttggcggggagaggggtcgacggcgttagttcgggcggcggtatttttaggcgtttggggcgttttttttcggatttggtcgttcgttgtttcgttttttgtattttattttttcgatttttttttttagttttgtttttttttgttttggtttttgagagtcgattgagtttagtttcgtgtagtagcggttgtttgtgtcgtcgtttagttttcggttttggtgttttttcgggggtgttttaaggagttagtgcgcgttgcgggttgggaaggaggcgtcgtttagttagttttttttttttttttcgttttttttttttttttgttgttgttgtcgtcgtcgtcgtcgtgggtgtcgggttcgcgcgtattttaatatttttattagttgggtttcggggtaagtttttggtcggtcgcgtcgcggtaggaggtgtgggaggtagcgaggggaagtcgaggtaaatttggtggcgtgggagattttacggggtttggggaattttagggtaagatcgcgggtttgagggggacgagggggcgcggtttacggagttggggaaaatgacgaagtcgggaaacgagaatatagtgtttcgttttttttcgttttttttgttaaaaaaaaaaaaaaaaaggtgtgggagagcgatagttgggaaggtaggttagatagaaataggtaaaaaaaggtagtgatcggagtcgagtttgttggattttaggggtcgattaggggagggaggtgttcggggacggggagggaggagggttgtcgggatgtgaatcggggaaggtagttggggttggagagtagcgcggaaagggggtttagggagttggaaagagggttaagaggagggtaaggaaggtggcgggcgacggggagaggaaagaaaaagggtgttttggcggtggttttggtaagagaaaggggtaaggggtataattgataaggtattgaaagtattgaagttagagttttgggaaggatttatcgaattttcggcggtttacgcggggatagattttagttcgtgagttttgagttttacgcggggatagattttagttcgtgagttttgagttttacgcggggatagattttagttcgtgagttttgagttttacgcggggatagattttagttcgtgagttttgagttttacgcggggatagattttagttcgtgagttttgagttttacgcggggatagattttagttcgtgagttttgagtttagaaggagtggtagttttaggacgtttgttaggtggtttggaatgtgagggaagttttagtttcgttaggaatagagttggcgttgagttttcggttcggttcgggttagaagcgaggaaagtttgtcggcgagtgttttttgtgttgcgtggagaggggtgtgggcggtcgtcgattcggcgttttttcgtcgttcgtttagggagtttttgtttggtaagttggggttcggggaaaagtttagtagcgagagggtcgcgtgtttcgggacggttttaggggagttcgcgcggaaacgcggattaggcgtttcggttcggatgtcg

SEQ ID NO: 11210 - DNA, 1502 bp, Artificial Sequence
  Description of Artificial Sequence: Synthetic polynucleotide
tcgcgggacggagatagggagttgggaggaaacgtaacgcgttttttaggtaatagatttcgagtttcggttcggaaacgtttcgaggtagaagtaagggtttttaagggtttcgttttttagttttgggtttttattattattttttttttagattcggtgagtttaggttgatggatcgtgtagtttagtttgagttagtttagtagtttttaatcgggcgggtagggaagaaggttttttattgtcgggaagaggttagcgcgttttaagtttttcgtaaatttcgtttttttcgtttggtacggtttttttgtatcgttgtgtttcgtttttaggtttttgttcgttaagaatgtttgtttcgggggcgcgttcgttggttaggaatttgtcggtagttttcgggaatttttgaggatgcggaggtgggttcgagagttgcggtttcgatgtcggggtgggagttaggtaggtcgcgcgtcgtcgtagttttgtcgtagcgcgtgttttggttttttcggatcgaaaaggtcgaagtcgtttttcgcgatcgatttcgcgtaattggttcgggtttgtatttagatggttgtgggttttatagggatggtcgggcgggttcgttcggtcgttattttagggtcgttagttttcgcgcgcggtcgtttttcgttaggaagggtggcgggttcggaaggttagagatgttttagtgtttttcgcgtcgttacgtatttagttgttcgcgggttttatatggttgcggtcggagggttcgtattaggatcgtcgtcgtttggggaagcgtttttttgtgggtagggcgcggcgggtagtgcggaagttcgaaagttatcggagttcggggtaggggcggcgcgatgtagaggcggcgttcgggggtttttagttgtttgcggttcggttatttagtcgcgattagagggggcgggggacgtaggaatttcggcgttcgggcggtgtgtagtcgtagatttattttaagtttttacgtagttgcgagagtttaaaaattgttacgtgtacgtcgttgttgagtgggaggaggtgtttgttatcgcgtttaaaaggggcgtttcggtgtttttcgttatgtaagtaaatggtatggttttcggtcgtttttgaataaacgagtgtttcgaattttttattaggagggattaggcgtataattattttcgatatttttcgggtatgcgagaattcggttttttttagtggggtttattaatgttgttcgggaggtaaagaaagtgatcggttaacggttttagcgtgggttttttttttttttcgtttttttttttaataaaggacgtacggagaataagttttttagtttttatagatgaggagtttaggagtcgggcgaatattaagtatttattgtgtgtttgtttttttattttggggaggttgggggttcgggagtgaagggggtagcgagatcgcgggttgttttacgtttatcgtcg

SEQ ID NO: 11211 - DNA, 510 bp, Artificial Sequence
  Description of Artificial Sequence: Synthetic polynucleotide
gcggtcggttttggaagaggtgggggcgaggggtcgggggtttatacgttttgcgatttttttttatgagaatgggcgggggtagtttcgggaagggtggcggatggagtcgttttttttttaggattataggggcgttttttagtgaaggcgtcgtaggaaacgttagtttgtgtcgtagtgtacgtagaggcgttatgagttcgagttttttacgtttagggataaattgggagtcgtgattgttaggtcgcgcggaggttgttttggtcgtttttgcggttaggtgaaggcgtagaggtagggaggtcgggcgagcgtaggcgggcggagagtagattacgcggaagaggtcgagagagaaagcggggtattcggtcgggggggttatttataagggacgttgggtacgaaggaggttggggcgaagatgagtttaggggttgggttgagagcgttgcgtagtcgggttgagaagagaagttgacgagtgattttcgataagggacg

SEQ ID NO: 11212 - DNA, 940 bp, Artificial Sequence
  Description of Artificial Sequence: Synthetic polynucleotide
tcggggcgtaggtaggaggtattggaagcggaagcgagtggggagttcgggtagagggagtcgtttatttgatcggtttcgtttttttcggggtttgttgtagttgagggtttcggattagcgattttagaagtcggttcggggtcgggtagtttaatagtttttcgcggattttttttcgttggcgcgtagtagcggcgcgtggattcgcgcgcgggttcgggacggcgcgagttcgggtagcgcgagtttttgcgcggtagggagtggcgtatgcgcgggcgttttgcgagttcgttggggcgagtcgagtcgcggcggcgtcgggagtcgggcggcggagttgtgaagaagtaagcggcggtacgggagtagcggcgacggataggtggcgagttttcgttcgcgtcgttaggggttgttgggttattcgcggagtttcgcggtttagacgtggcgggggtggcggcggtatttcggacggtttgtgagggatgcgtcgtttattgtttcgcgtcgtttgatcgttttcgtttcgattcgcggtgcgttatagtcgggttcgcggtcgttttcgtcgcgttgtcgttcggtcgtcgcgttcgcggggtcgcgttcggtacggttatgtggatttttacggaggaggagaaatacggcgtaggtaggtgaggtttaggtttggtcgtggcgggggttttgggggacgcgtttagttttcggtttcgtttggattcgtattttcgtgttttcgttattgttcgtaggttgcgcggtttcggcgtggggcgagcgcggggtgggggtaggtgcgggtgcgggtgcgggtgcgggggtgggcgcgggtttttgtgtagagagggcggtagggggcgttggcggtgcggttttggtaggtgcggttcgcgggaggggtgggtaaggttcgggtagttgttcg

SEQ ID NO: 11213 - DNA, 2718 bp, Artificial Sequence
  Description of Artificial Sequence: Synthetic polynucleotide
tcgtcgttagttatgatttatgttttagtagcgttgggaagtgggtcgagggaattgaggtcggggtgggtgcggaggtggttttgacggggagcgtcgatttaggatttggttcggattttgagttcggtaggatttgtgcgtacgtaggtagcgtcgcgtttttttttaggttgcgagaggttgttttgttattaggttatggatttcgagtcgttcgtgttgcgcgcgcgcgtgtgcgcgttttcgtttgcgtttatgtttgcgtcgggggaggcgaaggaggttttagttttagaaagagtagtttttggaatttattatttaggtcggtcgtcgttcggtttcgtttcgtaggttgtaggcggttttggagggggcgttttcgtcgagcgcgcgtttcgcgtcgtcgtttcggattttttttcggcgtcgcgcgggtaggttcgattaggcggtcgcgggtttcggttttcggttagttttttagggttcgcggttcgtttcgtttcgcgcgttcgtttcgttgcgtaattcgatttaagttggaagtcgatcgtaggcggtcgtattcgcgtttagcgtagggcggcggcggcggcggcggcgtagtttcggcgagcgaggcggcggtcgtacggttaagcgtggatcgcggggggcgttcgcgttcgggagtagtcggaggattcgcggcggcgtcggcgtttcgttcgggaaagtaaagttggagacggagggagcgcgcgggcgcgggggttcggaggagcggcggtcggcgtttcggcgcgtcgagttttagtcggtcggatgggaggcggagcgttcgggtcgtcgtcgtttgtcgtttgcgtttcggttgggtttcgggatcgcggggtcgtttaggtacgttcgttcgggcgtcgcgtcgtcgtgggttcgacgtcggggcgtttttcgtgagtcgggtcgagggcggggtcgcgcgaggatttcgggatttgttttttttttttcgtagtcgcgtcgtcgttcgtttcgggcgttttttgttttgtatttatacgttcggtagttgcggggagttcggtagttacgtttttcggcgcgtcgttcgcggagttattacggtcgagggtcggttgttgggcgtcgcggttttcggcgggcgcgttcgagtagtaggcggcgatgcgggcgtcgatttcggttggggggcgttcgagttgtcgcggttgcgtttcggttttaggagggacggcgtagttcgcgggaggattatggcgttttcggcgttggcggcggcgttggcggtggcggtagcggcgggttttaatgcgagcggcgcgggcgagaggggtagcggcggggttgttaatgtttcgggggttttttgggggtcgtcgcgcggttagtattcggcgggcgcggtggtagggttggttgtcgtggtgggtttttttatcgtttttatcgtggtgggtaacgtgttggtggtgatcgtcgtgttgattagtcgggcgttgcgcgcgttatagaatttttttttggtgtcgttggtttcggtcgatattttggtggttacgttggttatgtttttttcgttggttaacgagtttatggtttattggtatttcgggtaggtgtggtgcggcgtgtatttggcgttcgatgtgttgttttgtatttcgtcgatcgtgtatttgtgtgttattagtttggatcgttattggtcggtgacgtaggtcgtcgagtataatttgaagcgtatattacgtcgcgttaaggttattatcgtggtcgtgtggtttatttcggtcgttatttttttttcgtcgttggtttcgttttatcgttagttcgacggcgtcgtttattcgtagtgcggttttaacgacgagatttggtatattttgtttttttgtatcggtttttttttcgcgttttgttttattatgggtttggtttacgcgcgtatttatcgagtggttaagttgcgtacgcgtacgtttagcgagaagcgcgttttcgtgggtttcgacggtgcgttttcgattatcgaaaacgggttgggcgcggcggtaggcgtaggcgagaacgggtattgcgcgttttcgttcgtcgacgtggagtcggacgagagtagcgtagcggtcgagaggcggcggcgtcggggcgcgttgcggtggggcgggcggcggcgagcgggcgcggaggggggcgcgggcggtgcggacgggtagggggcggggtcgggggcggttgagtcgggggcgttgatcgtttttaggttttcggggttcggtggtcgtttgtcgcgcgttagttcgcgtttcgtcgagttttttttgtcgcgtcggcgtcgggcgcgtagtagcgtgtgtcgtcgtaaggtggtttaggcgcgcgagaagcgttttatttttgtgttggttgtggttatgggcgtgttcgtgttttgttggtttttttttttttttagttatagtttgtacggtatttgtcgcgaggtttgttaggtgttcggttcgttttttaagttttttttttggatcggttattgtaatagttcgtttaattcggttatttatacggtttttaattaggattttcggcgattttttaagtatattttttttcgacggaggagaaggggttttaggtagtgattcgtattcgtttgggaattttggatagtttcgcgttcggggttgggtagaaggggcggttcggacg

SEQ ID NO: 11214 - DNA, 2661 bp, Artificial Sequence
  Description of Artificial Sequence: Synthetic polynucleotide
gcgcggttttgtttcgcgttttttttagttagtatttacgtgtttttatttattttatttaggttattagttttatcgttcgtagcgggttagaagattcgataaagcgttttttattttgtaggattagtgttcggttttcgttgttttttcgttttttttttgcgtagatttaaggtttgattcggttttaaattttaaataaaagttgtgggtttgtttttaagtgatggcggttggagaaaattagagttgggggcggtatagttagggtgtatttttgcggtgggtcggttcggcgtatttatagtttttagttgttagtttaggcgttggggtcgtagggattgaatttcgtatcgttttcgtagttcgggtgcgcgttttatcggtcggtttgtttttcgcggttcggtttatcggtggtagggacggtttcgtttgttttagtttacgttcgttttttttttttttcgtttgtggttttgttcgtttttatttaagtttttggtggtttaacgtatttttgtagagatatttattaagagatagcgtgtgtattttgtttttcgttttacggaagaatttattagtagcgttatttagttttattcgttttaaagtacggtattttttagtttaataaaaagatcgaaggcgaaatattgtgggtttttgttcgcgaattaatcgtttagttatcgaattttttaaattgatttatttggaataagttattttgtttttttattttttattttatatatatatatatatatatatatatatatatatatatatatattgcggatcgggggtttagttacgtatatattttaaaataaacgagggatttattcgggatttttagtcgggcggtcgggcgttttcgttttttttttttttttttgagttttttagggattcgttacgtttttcggaattggggtagcggttcgtttatttcgtgttcgttgttggtcgggatgattttagattcgtttattaaggaagatttgatgttagttaaatcgttttttttttcgggatgattgatttcggcgaagattttttttttttgaggatcgttttcgtttttgaaggggattatttcgttcgtggcgtagagtttcgggtttttttcgtcgtcgttatttttttcggagagttggggtatttcggcggttttgtaattttcgtttcgttgtgggagtattcgcgtaatagtaggaaagatagaggggtaatttaagggtgggggaggaaaggagagttggaagggttcgtgtagtaggatagcgggcggaagcggggcgggcgagcgcggggtcgtcggtcggtagtcggagtagttgtcgcggcgttcgaatttcggcggtcgtcgcgttttttcgtttcgcggagatcgacgtaggcgttcgttttcgaggtcgaagggtattgggcggcgagggttgcggtagttggcgatttcgggggcgtttgcgcggcgcgcgttagacgaggttgtttcggcggttatttcgcgatttcgcgtcgtcgggatttgcgcgcggagaacgtcggttttggagggagtacgtttttttaaagtgtagaggagggttcggcggcgcgttttcgcggaaattttttttattgtagttatttcggatgtcgatttagtagtttgtttttcgagaaaagagaggggatttgggtagaagggtttcgtttgttttaaaagaaggtgtaaggattagaagataacgaaacgtttattttttgaagggtgggaaaaaaagaaaaagaaaaaggagttatttacgttggagatgttcgttttagatttttttatttttttttttttcgtttcggttttttttttcgaggtttatttaatttgttagagaaggaggaggagtagaagatgggggtcgaggaggaggggaagagaaagagaagtttgttaagaataaagtttttgtcggtaagcgcggggatttcgtagtggagggtattgcggagtttcggggagttatagcgggggtttcgggtttaaatgtttttgttcggagttcgagtcgatatatatatttagttcgatttttttttgttttcggttcgagttttttagtttggttcgtcggttcgtcgttttgtacgttttcgtcggttagttttgttaaagtaaagagttgcgttttttgagttcgttcggtcgaggggaggggacgtttcgagtttggtcgcgtgcgaggtttcgggcgcgttttggtttttcggttcgagagcgcgtagttcgggtttttttttcgcgttttgtttcgtaggtgagcggttgcgtttttttattgtttttttttttttcgcgtttcgtcggcgttgaaaagttatttatttgcgtcgtttttttttttttttttttttttcgtttttagttttttttggttgttcgttggaggggaggcggggggtgagggggagtcggcgagaaggaggtggtgattgagggtttttttttttttttttttttttagattttgtaggacgagttttggttttggggtgtgtgagtgtggtgtgtgcgcgcgcgtttggagggaaggattaggtaatttggcgagagaaggaaggatcgggcgttgtttataatttatcgaaaggtacgttttgttcgcg

SEQ ID NO: 11215 - DNA, 801 bp, Artificial Sequence
  Description of Artificial Sequence: Synthetic polynucleotide
gcgaggaaaattgacgttttattttttcggattttgttcgagaagttgggggattcgggttcggtgtcgaggtgtggttcgagtttggtattatttacgtcggtcgggtgatttcggttttttggggttttcgcgtttcgttagtaggcgacgttgggaggttggggtaggtttagagcgaggacgggttcggattgggtagtggggatgtattagggtcgggtgcggcgggagacggttcgggaggcggaaggtcgcggatttgttcgatagaagagtagatgaggggagatcgaggacgttcgggttcggggagtttacgaggaggttaggatcgcggggtaaggaattcgcgggtagttattttcgttaggggtagggttcggttagttaggcgcgagaaggttaggcgaggtcgattgcgcggggtgaagacgttaggtcgatagttgcgggttttatcgttagttttgacgcgagtttgcgttttggcgacggcggagggcgggtagggggcgcgggcgttgttacggcgtttgtttagaatcggtcgggaacgtcgcgggcgggttttttcggtttttcgtttttttagttttgtttttaggttttcgttcgggttttttaagttgttagtcgcgttcgttttcgggtttttcgttttttttttcgcgcgtttttttttttagcggtcgtcggatttttttagtttattttttttagttaacgcgtttttcggacgttgttagtttgagcgtataggtattgggcggggtttacgggggagtcgtttaataatcg

SEQ ID NO: 11216 - DNA, 311 bp, Artificial Sequence
  Description of Artificial Sequence: Synthetic polynucleotide
tcggttttcgtttcggtggttttaggtttcgggttttgtttggcggttttgtttttaatgcggagttggcggttttgtagtaacgtttttgttagtagcgtttattgagcggttttttagttgttgtatcgtttttagcgtttaacggaacgtttttcgtacgcggagtttataagttgtttgtgtcgttattttttcggttttggtatcgttagtattttttaggaattttttaaattcgttttacggtgtagaacggtaattgtatcgagtttttgtgttaattagtattttcgtaatatcgttagtcg

SEQ ID NO: 11217 - DNA, 1048 bp, Artificial Sequence
  Description of Artificial Sequence: Synthetic polynucleotide
acgggagtaggtcgggttgtttacgacggaagtttcgattttggttggggttgtcggtcgggtagcgcgggagagttagggttagagtcggggtcgggaattttagtttcgtcgtttacgcgggatgtagcgattatcgttcgtcgttttcgggtcggtatttattttcgtggaggggtagcggcgttagtatttggtcgcggatttcggttttgggggagttaagttcgtagcgttcgcggtcgatgcgaaacgtgagcggggcgtcgcggtcgggtttttgtatcgttacgttgatgagcgtcgtgtagtatttttggttcgcgttgtttgttcgtgtcggttataggttgtaggttagtagggcgagcgcggcgagtcgggtagggttcgttcgtttcgcgtagtttatcgttttttcggtagtcgtcgttgttcgcggatcgggtttcggggtcggcgtttagaggcggggcgggcgcggttcgggcggcggcgggagcgcgcgcgcgcggtttgcgcggggtcgagttcgagcgcggtttttttggacgtcgcggtttcgtcgttcgtcgtttttacgtttattgttcgtttgtggggacgcgtttatgggttttcggcgagggcggcgttttaggtcgtacgcgggcgttttttcggggttttaggagggttgtagaagcgtgttttttttattttttcgggtcggttttatcgaatgggaggcgtttcgtaaggacgcggcgggggaggggaagggcggtacgggaggaagcgtttcgaggagggttagcggaatataaagtttttttcgcgcggttgtcgtttgaggcgcgtgttcgtcgtcgtttcgttttttcgttggtttagcggtaacgcgtaggtttaaggcgtagtttcgtttcgagcgtatgcgtgttagggtttgttcgttttcgttcgtttgtacgagggttcgggtagtcgggttagtcgttggtgttggttgtttttttgttaggcgtgatagtcgtagggcgtggagttcgggagatttgcgaggacg

SEQ ID NO: 11218 - DNA, 301 bp, Artificial Sequence
  Description of Artificial Sequence: Synthetic polynucleotide
gcgaaattcgttttcgtttcgaagaagggttttaagaaggtcgtgattaaggcgtagaagaaggacggtaagaagcgtaagcgtagtcgtaaggagagttatttcgtatacgtgtataaggtgttgaaataggtttatttcgatatcggtattttttttaaagttatggggattatgaatttttttgttaacgatattttcgagcgtatcgtcggcgaggtttttcgtttggcgtattataataagcgttcgattattatttttagggagatttagacggtcgtgcgtttgttgtttttcg

SEQ ID NO: 11219 - DNA, 1395 bp, Artificial Sequence
  Description of Artificial Sequence: Synthetic polynucleotide
gcgaatcgatttgtatttttttgtttattaggaagcggtcgtcgtcgtcgtaattgttggcgttgatcgcgtacgattggaaagttgtaattttatggttcgaggggtaggttcgggttgagtaggttttcgagtcgttattgttaagtatggggtattttaggaaggagtttatttttgtattgtttatttgttattgagtgatttggttttgcgaagttcggcgtgattgtgttaatttttttattttttttatggggtcggagaagaaaaatgatatgaatgtatagtgcgtaagagggggggcgggagggcggaggacgttggaggaggggtacgtgacggtgttagttaatggttgagttttttgtaaaagtttgtcggttttcgtagtgatggattatcgttttagtggtatttaaattttcggcgtttcgtcgtttaggtgacgcgtagtcgtttttttaggtagtttaggcggcggtagttgttgcggcgattgtaaaggtcgatttggagtgttggagcgaagaagagtaaaagttgcgttttgcgcgcgttcgatttcgttgttcgtttcgttaggttttcgggaggtgggggttgggaggcgtttttcgttttcgttttttttttatcgtttaatgaaagatgaattggcgagaggtgagaagggaagagggttttcggttttttcggggcgggaattagtgggttagagttcgtcgggtggtcgtaagtacgtcggtttagttcgtagcgcgtttagtcggaaggcggggaattcggttgatatcgcgtttcgggtttttaggttattttttttgttttgaggttgggttgggagatcgtggggttgtgaggagcgtatagaatcgtggtggagggcgaggttgggttatcggttttttaagttcggaatggagggggaagagcgtagagggttggttgggaggaattcgggtgggcgtgaaggagacgagggtaagaaaagaaatttttttttttttaggagggttttcgaaattttttttttatagtttttttcgttattagtatggtaatgaggagtttttgtaattcgatttggaggggcggatgagttttggaaatttagagttcgtcggaaaaggtcgggggcggtcgggttttttttttttattttttttttttcgtcgtttttcgttttttttttttttttatttagttttgtatcgggagtttttcgggatgcggagttattcgatcgtcggatttttaggggtaggaggcgggggagagagatgacgttggcggacgtggttagcgcgggggtcgggcggtgcgttgtaggttatttgtcggcgttttgagatttaggagttttcgcgttttcgcgtgggttttatagggtcg

SEQ ID NO: 11220 - DNA, 766 bp, Artificial Sequence
  Description of Artificial Sequence: Synthetic polynucleotide
tcgggtttttttcgttgtggttcgtttgtatttttgagttggtatttgtttttcgggcggttagacgttcgtttggtttttttttcggtttcggtttttttttcgcggcgttttaatggttttcgtttttcgcgtagggttacgattgtttttcggtgttgtttatttatgacgtcgtcgcggggatgttgagtttcggcgggcggttggacgtttttaagtagagttcgtagcgtggtttgacggttcgcgagcgtttttagaatttggataagaaggcgagtttcgagggtggtacggttgcgggcgcgggtttagattcgttgtataagaatagcgttaggtgagagcgggagtcgggtcggcgggtgggcggggtttcggttcgtttagaaatagcgtcgggtgaggaaggggtttggagttttttttttggggtattgtgttgggattttgaggattggggattcggagggagggtaggcgtgtttttaattcgttgcgtcggaacggcgtttgatgagcggcgggttcggatacgaggggacggggtcgatttgtgggcggggttttggcgtcgtattaaaatcgcgtggggcggaggtcggtagaggtcgcgtagcgggtttagggtagggagtggttttgattcgttgcggaataatatcgttagttgtgggcggggtttattttgattttattatagtagtttaggtgttagtggagtttgggagggatacggtgcgatcgatataagacggggtcg

SEQ ID NO: 11221 - DNA, 691 bp, Artificial Sequence
  Description of Artificial Sequence: Synthetic polynucleotide
gcggtaaagaggtcggatacggaatcgttcgttcggtgatcgaagagacggcgaggaggagttcgcgaattcgtttttgtttaggtttcgtttattcgacgtaatttgttcgtttttttttatttttcgaagggtggagtttgaggtttcgtttttaagcggttttttttcggagtgtttggcggttagtagggcggggtaggaggttgggagagggacgggtgcgggggtgggggagaggaagggagcggttacgtgtgaggggcggttcgaggttacgtgacggagcgtcggagcggagggagtcggggttgggagtttttttgagggaagaggagtggagtaggggggacgcggcggcggcgttgataatggtgagtgcgcggcggttagcgcgttcgtttttcgttttcgtttcggagcgcgcggcgggtcggttaatcgcgggtcgggcgtcgtcggaggaggggacgggggagtagggcggggagcggggttaggtttgtcgggttatttttgggtttgggaaaagttggcggcgttattttttttcggtttcggcgaggttcgagtatttacgggcggcggcgtgtttttttggttatgtcggagtttttgttcgcgtttttcgattgtttgttggggttttggttggggattcggatttcgtttttgcgggggttggtcgtcg

SEQ ID NO: 11222 - DNA, 1024 bp, Artificial Sequence
  Description of Artificial Sequence: Synthetic polynucleotide
tcgggagggcgtagcgttcgggtggggagttcgagttagtttaggtcggttttggttttttgatttagatagcgtagggcgcgagggatcgcgcggtcgagttcgggtcgcgtcgtttttagtatcggggtcgttagttaagagttcgaggttttttcgattcggatgtgatgaaaaagagtaatagagggagaagtgttttaggattgtaggagtggaagaggggaaagagaggtagagagggggaaggttttttcgtaggggagtcggttggagtgagttggttggaaagagggggcggagtgcgcggagttagagtcgttatcgttgtcgtagttgtcgttattgcggcgtttgggttgagtcggagggaggcgggaggacgcgtaggggcggtcgtcgtcgtcgttaggttatcggggcgaaaatgcggtcgttgtcggaggttcgttaatttttcggggtggaagaggaggaggaggaggaggaaggggtttggagcgattacggggggatgcggaggtaggtagtggttttcgggcggggaagaggaggggtttgatttttattttcggggtttttttaaattcgatttttttttttagttttttttcgttgggtttatttcggatttttgggatttcgtcgttgttaatttgcgttgtaatagtttttttcgtaagttttaaattaaaattttttcggggtggagtttgagggagggaagtggagggggagggaacgtttcgtaggggtggtgtgtttttttttaaaaatatttttttttttaattttgtatattttttcgttagaagtagttagttttttgtatttagtattttatagtttttttttcgtgcgttttgtcgggcggcgagttaggcggtagcggcgcggcgcgggttcggcggagcggtttatgttcggcgcgggcgaagttttcgttttcgggttcgtggggtcgtagcgcgtggtcgaggcgggcggcggttagttgggttttatagtttagggtgagtgcgcg

SEQ ID NO: 11223 - DNA, 1339 bp, Artificial Sequence
  Description of Artificial Sequence: Synthetic polynucleotide
tcgtttttagcgtttttaggtttatttttcgtagatttttttcgggtcgtttttttttgttttattttaggcgttttttttttttcgtagttatatcgtggttgtattcgtcgttttttttttcggtcgttattatttcggttttttagaattttagtttttcgcgttcgtagtcgcgtttttgttttttcgattttcgtatttttatttggttcggttttttcgtttttttttcggtttttttttttaggatatttgtgtcgttttattttttttattatatacgtattttttattttaattttttcgtttttttgttttttttttttcgtcggtttttttttttcgttgttgtttcgagagttcgatgtgggagggaaggcgcgggggaggggaggtcgcgaagggggttgttttttttcgggtttttcgtgttgcggaattgtagggttttttagcgttttttgtttttttcgtcggcggcgcggaagtcggggtttttcggacgttttcgatgagggtatttatttttttgtcggggatattttgtagacggttttaatattggtaaatattatagagaattgatttcgttcggtcgtcgtcggtttttatttttcgggtttttcgtttttcgttttcgttcgttttcgttcgttttttcggcgttttcgtcgcgttttttcgcgttcgcgtcgcgcgttttcgtttgcgtagtcgttttcgcgttttagtacgttcggtcggcgcgcgcgttcggtatcggttttatttttatttcgtttttcgttggttcgcgattaagcgcggttattgttcgcgacgtagttttcgttttttggcggttgtcgggttttagtagttgtaggttttgcggggttagcggcggcgagttgggtttttgggcgagggttattttcggggggtttgggtacgcgggcgagcgattgcgtaaggagcgcgttcggttcgtagttttttcgttttcggcgcgatttttcgttttttcgtttgttaagggtgggtttggggtagttttttttatatttgtaattcggtaattttttttttcgttcgattgatcgtttgttttttttggttcgtattttgtgttttgatttttcgttcgtattttttttaggtttttcggttgtttttttgtgttgtgtaggggacgcgcgattatttcgcgtttgtttcggtcgtcgttgtgtaacgtacggtttagcggattttgtatttttttagacgggggagggggcggggaggaggttgttttatcgtttcgtttagtaaatattagggattcgtgattatttgttcgttaagattcgcggcg

SEQ ID NO: 11224 - DNA, 2273 bp, Artificial Sequence
  Description of Artificial Sequence: Synthetic polynucleotide
acgcggtggtattggtggttgtcggtagttgtcgtttgtagagtgggtgagatcgagtgtggtagatggtttggttcgcggtgttggaggggattggcggagtagaagcgttttggcgtcgggtttttgtttttttggagttggggtttggggaatggggtcggttattgtagggatagaggagagggtagggtaatgggtgcgtaggggttttttttaaaggttgcgggtggttaggggtgtgcgggggcgttgaggtgcggtcgtcgagagattttggtttttagggtggtcgggtttggtatggattttaggggatggtgtatatatcggatcggacgggttttttttttattttcggatttttcggttgggtagcggttagggagaggggcgatttacgggggcgggtgtggggacgtcggattacgcgttaggagttttagatgggtttagatttttatttttcgtttcgggtcgtagtgacgttagggttcggacgttttcggaacggttttttgggggcgttttagttttacggattcgtagggagttttcgtcgtaatttgtatggggtttatttgtatgatttcgtttcgcgcgggagtcgggggcgtcggcgattggaggagttattgttaatttttaggggaaagtgggcgaggcgatttttgggtcgtttattttattttattttttagttcgcgtcgtatttggggtttttttttatttacgtttcgttagggcggggtcgcgggcgtagatattcgcgggtatacgtacgacgacgcgtatacgcggtcgtacgcggtttttcgagttttttgcggcgatttcgatttattttcgcgggtgcggggcgcggattcgttcggtttagtttttgttttttaggcgtttttttttttcgcgatttgtttcggtcgtattcgttttcgttttagtacgcgacgttgttcggcgcgatttttgttttttcggtttagttttatcgttgttttcgatttaattttagttgaacgttcgtagttttagttttattttcggtttagttttagcgtttttagttttattttcggttttagttttagttttagcgtttttaggtttagttttagttttatttttagttttaatatttttaggtttattttcggttttagttttagttattttagttttagtttcggtttagttttagttttagcgttttcggtttcgggtttagttttagttttagttttagttgagtattttcggtttcgtttgttcggcgtttttttttgtgcggcgttttttcgttcgtattcgttcgattttttggaatttttcgcggacgtcggggtttttggaggcggttttttttgtttttgttttcgtttttttttcgcggcgttttcgttttttatttatttttttagtttcgcggggacgaggggagttggagggagttcgggattcggcgcggttttcgtaggcggcgtttttttttcgttttcgacgcggtcgttttttttgtttgttcgtttttatcgtcgttttcgtttttgtcggggacggggatagtagattttcggcgttcggttttcgcgtatttgtcgcgcgtatcgttttttcggtttgcgcggtttcgggggtttcgggaagatcgagcgttggcggttagttcggggaggttgtgggtagtaggggtggttgcgggtttttagtttttttttcgtttatttcggagtttatatttgggatttttatttcgggagaattttgttttttttttacgatgagtttggaggattggagtcgggatttggtatttttagggttgtgattgggtgaattttgagggtatagttgttgttcgtcgttttaggggttttaggatggggcgagtagttttgaagaggtttaagggtatttcgtgaggagtttttacgttttgagagtggggcgtagagtcggagtttcgggttatgttttcgttgtcgttggcgcgggatattcggtagtcgtttggcgtttttttgttggtgcgaggttttatggtgttttgtaacgtttgtttgattttgttggttatcgttacgttcggtttcgcggtgttgttgttttttaataattgtaggtggtcgcgggcggggcgtcgtattggttaagttttaatttcgaggtttttgtatatagaggttggaggtcgcggcgggttcgcggggttttcggtagtttttcggggatgggatgggttattttgcggatttttcggtttttggaggtcg

SEQ ID NO: 11225 - DNA, 5586 bp, Artificial Sequence
  Description of Artificial Sequence: Synthetic polynucleotide
gcgtcggttgttggggttgttaggtgttaggagacgtttttttcgggtttgtttcggcgttcgtttttatcggcgtttgttttgtcgtttagttataggtttcgggttttttcggtagcgcggagttgacggtgggcgcggcggtcgtttgttttttggcgttggagggcgtcgacgtgagttatattaattatcgcggtcggagttcgttggatttggtcgtcgagggtcgcgtgtttaaggttttttagggttgcgtttagcgttttcggtgagttcgtggacggcggggatggggttcggcggttttcgggttttttttaagtcgttttttttttttgtagggagcggtaggcgggcgggggcgcggtttcgggttttaggtaaacgttcgggatttttaatatcgtgacgaatttgtacgtgggcgtcgcgtcggggttcgaggtcgttgagtgtttggtgtgtttcgagttggcgttgttggtgttgttttcgtcgtgttagtatcgtatcgtgtgtgagggtgagtggggggtttcggggtggggaggttcggttagtagggtcgtagttaatcgcgttttttttttcgtagagtgcgcgcgtaggatgaagaagtgtattaggtgttaggtggtcgttagtaagaaattgcgtttaggtgggtgaggttttgcgtttttaatacgttttttgtttagttggtggttcgcgggttttcgttttttatttttttttttttatattttcgtttatggtttttttttaggttatatttcgtttttttaaggtttatattcggttttttagtttttagtttttagttttgtttgttttagattatattcggtttatagtttcgttttaaggtaatattttttttttttattatattttagtttcgttggattttacggttttttttagattatattttttttatagttttattttagattatagtttatttagagtatcgtttttttattatatttcggtttagtttatagtttatttgtagttttgattttagttcgtatattattttatgtttgatttttacggtttattttttgttcgtattcgggttttatttttgtttttaaattatttatttcgttagttttttttgtaggttataattcgttttaggtgatatttcgtttttagtttcgttttttcgtagttttttgtttttcgtatttttttattcggttttttagtttatattcgttttttatttcgtagacggttttgaggtggcgagcgtcgttttcgttttcggttcgtcgcgttagttggtggaggagttgtagagtcgttatcggtagatggaggaacgtattatttgttttatttgtatcgatagttatattcgtttcgtgttttagtgcggttacggcgtatgcgttttttgcggtttcgcgtttagcgtttgttttatttgtcgttagtttattcgcgatcgtatttagattttcgtgtgagtcgcgtcgttcgtcgcgttcgagttgttttcgcgtgttttcgttttgtgttttataaaaagaaagattttcggacgttgtttttgttgtttgtttgggggatcgggcgtttttggggtttttttttcgggatacgcgggcgagtttgggggcgaggagggggggtttttttttgggttcgtttcgttcgttttaggttttcgggtttagattttcgttcggattgcggttttcgggttaggatattttttaggcgcgggtacggtcgtttttcgttttttaggttcgggttcgacggggcggggatttttgtgtttgttttcgggtttttttcgttttttcgttttgggggcggtcgcggggattcgcgttttgatttaaggggttcgatattttttagggttgtggggtttcgttttagtagggagttagttggggggcgttttaggtagggtttgggggtcgggcgtacgtaggcggggtgacgagttgggggggcggggggcggtgtcggagtaaatacggcggttaggtttagtttttcgcgttttttaagaatcgttcgcggtcgtcgttagttgtttggcgttgatttcgttggtcgggttgtcgttattttgggttcgacgtcggcgcggaaaacggggagggacgagatagatataggtcggtttggttcggaattttttgtttttttgtttaattttttattttcgtttcgcgggacgtcggtgttcggtttcggttttagtttagagtcgttcgcgtttggacgtcggtcgtttcgtcgaatttttgggttttcgagtttttcgttttcgtttttaattaggatcggtttagatttttaggttcggcgtttagtttcgtttttcgtttttttcgttttttttttttttttgttggggtttagtcggggatttaggagttatatattttttattttacgcgttattttttacggggtttttcgtagttagggttcgttttttttcggtttttcgggagattttggtaagtttttttttttcgtttcgtaatttggtatttttcgcggtttttgtttatttacgtatttttttttcgtttttttttttatcgttttatatttattgttacgtttttattcggttatttttttttagttttcggggatattgttaggcgagcgacgcgttttttgcggtttagtttagttgtttgggttaggatggagatttcgtttatgtggggtttaggggttttttgaggattttatttgggaaaaaagttattagattatttattgtttagtagtgggggtttggggatttttattgttatttttttttaagcgggagttttggcgttgtttttttcgggttgtttggggtttttttcgttttttttttcgaggatttcgtttagtaggttatgtttaggtttttgtttttggtttacgggacgcgggtttttatgttttcggttggagatagtaggtagttcggttaacggacgggttagttggttttttttaggggtagttttgttttttttttcgtttcgttttttttttttttattatatcgggttgtaattcgagtcgtcgagttattgtttttttttcggatttttttcggaggttttgcggttcgggttttcgcgttttgttgttttatgtagttttgagttttatagtaagtttgttatgggtcgcggggttcgtgttttttcggaggtttcgggggtaggcgtcgagcgtcgttggtttggagtcgcgttggtcgttttgtgtttttttttcgcgttggtgttgttggttcggttgggggtttcggcggtgtcggtttggagcgtagcgtaggtgagcggcgggggggaggttaggtgtcgggttgggggggtttttacgtttgtgggtttggtttatcggggggttcgtaggacgtgtgcggggtgtgcggggtgtttgagggttcggatgtgcgtttcgaggtcggagggttggacgtttttgtgtttagttgttgggaggggtgggaggtttcgttttgttgtttagtttttttttttttattgggtcgcgtttttagggacgtgtaatagggcgtttaggttaggagattcgaaattataggtagataggattcgttacgttcgtttttagttttgggtatttttattttcgtttttttttagtttatttttcgcggtagtttttggttttggggatcgttatcgatgttttttacgtacgtttttttttttgaagggagacgtcgttgcgttgggtttttcggcggttttttttattcgggtttcgggtttattggtttttcgtagacgtcgttatacgttgattttagttaggttgcgttgggattattttaattttatttataggtgcgttttggttgggtttcgggggagggggcgcggtcggcgttcgttgagtttattttttttgtaggattttttttttttcgcggaatttgttgagttcgcgggagacgcggcgggttttagttgtcgtttttcgtatgtggagcgacgtgtttttttttagttttcgcgaggtggttttcgagtagtttagcgattttcggataggtgggcgttcgttttcgtttcggttcggttttgcgcgttcggttttttagtttcgtgttttttttaggtttttattcgattaattatacggattgtttggttttcgcgttgtattattgtttcgacggttttacgggggagttggtttacgttttttttttttcgtacggcggtatttatttcgacgatagcgagtattgggttttgggttttacgcgttatagttggaagaaaggtgatcgtttaggttggttttttggaggttttttttttgtagtatagtgggttgtcgcggtcgggttttggggtagacggtaggagggatttttcggggtggtggttgttattggagtttagtaggtaaggaggggagttcgtgggagtttttatttcggtagttttgaatttttttttttatttttttgcgtttttggagcgggagttggagttgtatttttgggggtcgagtttatcgtttgggtttagaatatttttattttttcgtggttgcggtcgagggcggtttcgcggttgcgttttagtagatatatcgggtttcggggagttggtttacgggcggcggggttgggttcggggtttttaggcgttgattttcggggttcgtaggcgtgtggtttacggatttggtgtacgtggcggtttacgagatcggttacgcgttgggtttgatgtatttataatacggtcgggcgtttatgtatttgaacgttacgttgcgcggttggaaggcgttgttttaggacgagttgtgggggttgtatcggttttacggtgagtttttttgtcgggcgggagggcggggatcgggcggttttgagttaggtcgtgttttttacgttttcgataggatgtttcgataggttgttcgtgtgcgcgttttgggcgcggaggggtttttgcgacgttcgtcggcggtttatgaagaggttttgttttagtagttgcgatttttgttacggtgatgtttacggggtcgggatagggttgcgtgggagttgggttttggttatggtcggggttgagggggtattgacggggtttttttttttattcggagtagaattttttttttttacggtggttattattttatcgttttttaggattaaaattaggttggtgttcgagggtaggaacgtgatttttcgttgcggttagaagattttttataagaaagggaaagtgtagtgagtgagcgtttcgggcggttttcggggtgggtagttcgcgggcggttttggggtaggggtgcggggtaggtagcggggggggttgtgtttgtaggagacgtttcgtttttttgtagttggtataaggattaggagtttttggagtttttttatttcggttatttggttttgggcgaggcgtatttgagtattatcgttaacgtcgttaatgagggtatttatatttgcgtggtgcgtcgttagtagcgcgtgttgattatttatttttggcgagttcgtgtgcggggttgagttcg

SEQ ID NO: 11226 - DNA, 1264 bp, Artificial Sequence
  Description of Artificial Sequence: Synthetic polynucleotide
gcgcggttcgggcgtagtttcggcgtagttttcgcgtcgagcggtttcgcgtttcgtattagtttttgttcggtttcgggtgacgtcgtatttttcgattggattacgcggtttggggggcggggtttggttcggtgagtttatcgtcgcgtttcgttattggttcgggcggcgtattcgggtagtggcggggagatcgcggtattcggagtttcgcgagtcgttttagttgcggcgagtggagttgagcgggcgcggggtcgggttgggtcgggtcgggcggggtcgggcggggcgcgggagttagtgagcggcggttcggcgtaagtttgacgagtaggagtcgagtttagtaggttcgggtaggtgcgcggcggcgcggggttaggcggagggcgcgtgcggtcgagggcggcggttggcgggggcgcgcgcggggcgggggcggggtcggggcgtggggatacgcgtgttcgcgggtcgggggcgtggtgcgcggttacgcgtgtttttggcgcgagtgtgcggggttaggtcgggagggcgtgcgcggatcgggcgtgtttacgcgcggtagggaggggttacgagggtgcgcgcgtttttggcgcgagtgggaagtgtggggattcggcgggttcggtgtgaggggcgtgtttttggggcgagagtggggagtgagtgtgaggagtaagggtgaggggttgtagggaggggtgcgtttggtcgaggagtgggtgggagatacgcgtgtttatgtcgcgagggtgtgtcgacgttcgagtttgcgtggggttcggggtcgtgtgtttggagtggtcgagggcgtgaggggcgcgcgtgtttgtgcgaggggcgtgtgcggcgggtgtgagttacgcgtgtttgggtgcgcgcgcgggtcggatgagtttttggagtggtgcgaggacgcgcgcgtgtgtttgtgttggagcgagggcggggacgagcgtgtcgggcgcgcgcgggcggggttggggcggcgtcggggcgcgcgggggttcggttcggtcggcggcgagtgtgttggggcgttcggtttttttttaatacgggtttttgggatttagtgtcgtttttttttcgcggcggggttcgcggagttttcggtttttttgggtagataggtgcgaggcgaggtgcgggtatagttttgcgttttttagcgggtgcgggatcgggcgacgggggattgtttttaattatagattaggggagcggagggacgttcgatttattcgcg

SEQ ID NO: 11227 - DNA, 716 bp, Artificial Sequence
  Description of Artificial Sequence: Synthetic polynucleotide
tcgttttcgcggggcgggaatttcgcgtttttttttttcgagttttattttttatggtaaagcggcgtggggcggcggggcggagggagtcgagggggcggggagggcggacgggcggaggggacgggaggtttagcggtttcgggtttcgttggttcgggcgtcggatcggagtcgtcggggcgcgggcggtttaggtaagcgggtcgggtgggtgggggtcgcgttttttcgtttttgttttcggtgtatataggtgatagcgtcggtagtgttcggtcggagtttgttcggtcgttagtcgggattttcggcgcggcgtttttggaggggtttgcgggtggggggtgcggtttttacgttttttgcgttttagttttttggttttttttttcggagtcggggagtcggtaggttcggggcgagggtttagtgaggtcggcggagggtcgagttttagttcgggagcgggagtcggggattcggcgcgtagggcggaagttttcgtataaaaggtcggagtttcgtatatggatcgaattaaagtttcggcggcgtttagcggtgatttcggcggtcgttttgttcggttgtttgcggagggtttcgcgttttcggagttcgggggcgttttaggtttttttttttagttagggttaggtaaggggagggacgggtttcggggttgtttttttttgggttttacgcgttcgtcg

SEQ ID NO: 11228 - DNA, 619 bp, Artificial Sequence
  Description of Artificial Sequence: Synthetic polynucleotide
tcgttcgggattcggggggaggcgcgttgggtggttcggtagtcgggggcgggcggtagtttgtaggcgtaattggtatgtacgtcgttgtagttgagatcgtttaataaagtattatatattttatcgtttttatattttattattttacgcggagtttgtgagagggttttaatgggagttagttgtgtttttattttttgttgtcggtcgggacgggtttttttgcggattttttgaaatgaaataatgtgatgtacgtcgcgataagggtcggtttgtaatgaggtttaggtcgtcgggcggttgttattgttttaggtgtcgcgtatttgggttgcgaggataaggaggaggagggggcggcgtcggaggatcgggggggagggggaagtcgcgaggggtagggggtgggagaaggcggagggaggaggtagggggtagggggcgggcggaagaggggaggaaggagggggcggcgggtcgcggtaggttaggcgggagaagtcggagatagagagaggacggggatagtggcggtttgtagagttttaggaattcgggtttaaattttgttcgttagcgtgagagagcgtttgttcgtttaggcggtttatcg

SEQ ID NO: 11229 - DNA, 293 bp, Artificial Sequence
  Description of Artificial Sequence: Synthetic polynucleotide
gcggtttcggtaggggttgttgcggcgatttaggttgttgcggttttagttttattagttgttgttgttttttaaggagacgtcgtcgatagcggagtagtggttgttgttgttgcgggggcggtagttagaggttttagcgttttaataatcggagtttaggatgttgtttcggttgttgagaggttcgtaatttttagcgttgcgttagagaaattcgtttagtttagagcgggttcgtttcgttgcggtttttacgcggggttgggtttcggagtttgtttcgtaaagcg

SEQ ID NO: 11230 - DNA, 2748 bp, Artificial Sequence
  Description of Artificial Sequence: Synthetic polynucleotide
acggtagggggttttcgtgtttttcgagaatttaagaattcgtttcgtttttacgcggaaagttgggagaaaaattgttttttttttatttttttttattttttatttattcgtttttggagtttcgttcgtagatatttttttttttcgagttagaaatagatatattattttttttttattttttttttcgtgcgtatattcgtttttttttttttgtttgtttttcgtttttttttttttttttttttttgttcggagttgtagtttgtagtttcgattcgggttggttggttggttgagtgcggtcggggcgttgttcggtagtgcggtgtttacgggattgataggtaggtaggtcgcgggttgggattcggatattaaagtaaaagtatcgttgggcgtcggaggagtcgcggggtttttattttttttttgattgatttttaaattttaatttgtatttttttcgtcgtttcgttttttttttttcgatttcgttttatcgtttttcggtttttttgtttttttttttttttcggttttttttttcgcgttttttttttttgcgttttcggtttgttttttttttttttttttcgtttttttttttttttttttttttttttttcggtttttttcgttttttttttttttttttttttttttcgttttttttttttgcgttttcgttttttgtttttttttttcgtgtttgtagacgcgcggatcgtttatgcgtttttcgcgggtagaatgttgggtagtagcgttaagagcgtgtagttcgaggtggagttgagtagcggcggcggcgacgagggcgcggacgaatcgcggggcgtcggtaggaaggcggtagcggcggacggtagaggtatgttgtttaagcgcgttaaggcgttcggcggcggcggcggtatggttaaggttagcgcggttgagttgaaggtttttaagttcggtagcgtggatagtcgtgttttcggcgggtcgttcgtttttaatttgcgtaagtagaagttatttattaatttttttttttttacggatttcgagaaaaagttgtagttttatgagttcgaatggagcgacgatatggttaaggcgtttaaaggtttaggtaaggtggggtttaagggtcgtgaagtttcgttgatgtttaagacgttgtttaagtcggagtattcgtttttttaggttaagggtagttcggcgggcggcgttaagatttttttggtttcgttcgcgtttaatttgggaaagtcgagtcggatttttcgaggattttatgcggaggttaagtcgtttagtaaggcgtttgaagcggtcgtgagcgaagatggtaaatcggacgacgagttgttttttagtaaggttaaggcgtaaaagagttttgggtttgttttttttgttaagggttaggaggagcgcgttttttttaaggtggatttcgagttggtggtgatcgtgttgggagatttggagtagttgttttttagttagatgttgggtaagttttgtcgtttcgtttcgtttcgtttttggtttttttttaattagttgttggggaaggtgtggggaaagcgaagttttttttttttgcgttttttcggagggtttttttgtttacgattaggttgtgatgggtattgcgtttagatgtgttgagttggtttatttttagatgcgtatggtttaagtgtatttttttaaagatattataggcgggaattcgggttcgattttggtttgttcgaggtgaggttggataatgggatggggggtgagggggttataggtttttagaaatagagttagaattttaatatggtaaaatttgggattggtggaaattttcgttgtggtgtggtttgcgtttgataggagtatttcgtattgtaaggggagcgtttagcgagagttcggatttagaggatagatgtgggagagtagatgtgagggttgattggtttcggaatatagttgaggttttattttttttgtggatttcgagtgggagcgtaagtcggattttttcgcggtgtgaggattttggttaaaagaagcgtttagggtcgggggcgggcgggttgttagttgtgcgtatttgggcgtatgttcgatattttagtttcggttttggttttaatttttatattcgtaggttttttagggcgtgtcgaaagttttgggcgttagcgtcgagatttttgtttgatcgggaagtttttgttttgtggttaatggaagtcgagtaggcgggaagggaggaataaagtttgttcgagtggaggaagcgcgtagagttgttttattgtttttcgtgtttgaagagtttatgtaaaaaaattcgaagcgggtttcggaattgtttttttttttttcggagagtttttgtttttagagaggaatagatttgggatgtgtcggacgttaggcggttatgtttcgggaattggtacgggtttttttggggttacggaataaggacggtggggtttggtgtttaggcgagttgttttggttgcgcggatttgttgcggtggttgggttgtgggtttttcggcgtcgagggattcgagttttttgggtattcggtaggttgttcgttcgttgggggttgggaaggggcgtgttaatgcgcgtgtgaaagggcggggtcgagtgacgggtttggcgggtggggaatatgtaagagttcgtcgggcggttttggagaatgcgaagtcggaggagatcggttcg

SEQ ID NO: 11231 - DNA, 433 bp, Artificial Sequence
  Description of Artificial Sequence: Synthetic polynucleotide
tcgtttcggcgtttttatcgtcgtcgtcgtcgtttaatagagtttttggggcggtttttatcgacggtgtagttcgtcgggatcgggaggaagtagttgcggttatcgcgtcgtgcgttcgcgttcggtcgttaggtgttttagtagttcgatcgtcgagatgtttagttcgtcggggtttcgggcgttatggttttgcgtcgcgttgtgcgtttttcggagggtcggcggcgttttttagttcggttcggggtttatcgtttgttcggttttttgttattgttaggaggacggtattatgttgtttgtcgattgttttgagttcgggttgttcgtcgtttcgggggatttggattttttgacggtttatttgtgagtattgttcgtttgttttcgtttggttttgcgggttgttggttagcgtttagtttcg

SEQ ID NO: 11232 - DNA, 1376 bp, Artificial Sequence
  Description of Artificial Sequence: Synthetic polynucleotide
tcggtatcggggttgtatttttgggtagacgttgtatgtttgtttttaggcgcggttttgttgttatttttttgggggttcggagcgcgatagtagtttggggacgtttttcgcgtttagtacggtgtatttgggttttgaggttttggtcgaaacgcgttaagttgggggtaggtgtagcgattttatatttttcggttgcgcgttttggcggtaggaggcggggtcgggggcggggcgtgagttggtcggggcggggtttatggaggggcgggatcgcggcgttttataagtattgcggagcgaggcgcgcgttcggttagagagcgagcgcgtaacggcggcgacggcggcgattttatcgcgtattttgttaggttttcggcgtttagcgttttacgcgttttcgcgttttcgcgttttcgcgttttttttttcgcgttttcgtttttcggttcgttaggtttttttgtcggttattcgttaggtttcgcgtcggttcgttcgtcgtttaggatcggttcgcgtttcgtaggtcgttcgtcgttcgcgtcgttatgggagtggagggttgtattaagtgtattaagtatttgtttttcgtttttaatttcgttttttgggtaagggttgcgtcgggggtcggggcgggagggggtaggtatatattttacgttgggtaggtttcgcggtagcgtgttaggtttcgcgggcgtagcgcgggtcgcgaagttgtggggttatttgtgggttttaggagcggggtggggggtcgttcggggttatcgcgtttttcgatattggggttgagggttgcgagtcgagtttcggggtttttgtgttcgggggtttatttttgcggtcgggtcggggtttttgggggtcgtcgggtagttttcgttgtggtggtgatgggtgcggtggtcgcgggtcgggattcgagtattcggtcgttttttagttaaggaggggtttgcgcgggtttttggtcgcggatttcggattgttgtttcgcggggacgaggggggggttcgcgggcgggatttttggcgtttcgtttttatgagtttattaagagtcgtcgtttttggatggtggggcgggggcgtatattttgtcggaggttgggggcgattcgttttattttttttttagtttagtttattttttaatttgcggttattattcgagatttttttgggggtcgcgtttaaaaggagcgtagattttcgtcgggatggtttagaagttggggtgcgcgtattttggtcgtttttgtttgggagtcgatttttttttttttatttagatacgttttagcggaggtttttttttagaagggttttggaggtttcgtaggagtggggatttcgcg

SEQ ID NO: 11233 - DNA, 3393 bp, Artificial Sequence
  Description of Artificial Sequence: Synthetic polynucleotide
gcgggtgtatagggagcgttaggattttagcgttttgtcggattagatttatacgttcgaggtgatgtttattattaggtatatgaagtatttgagtatgaagacggcgtagtcgggtttgcgtgtttggtcgggttgtaggtttcgtaggtacgggtagttgtgcgtggttttttagcgcgggcggttgtgttgttcgtagaagaggtaggcgattattatcgcggcgggtacggtgtagagtacggtgaataggtttaggcggattattagtttttttagtttgtgcgttttggtggggtcgttttgttgtttgatgatcgagcggatgcggaagagggatacgaagtcggttagtaggaatatggtgtcgatgaagaggtagatgattagcggcgttagtacgaagtcgcgtaggttgtttaggttttggttgtttacgtagtagatgttcgttatcgggtcgtcgtttatcgagttgagcgttagtatcgcgatggatttgacgttgggtataagttacgcggttaggtggaagtattgcgagtagtcggcgatggtttcgttgttttattttatatcggtcgttaggaattatgtgagcgataagattatttattagatggagttggttatgtcgaagaagtagattagtaagaagattacggtgtatagcgcggggtcggtggtttcgtagcgtacgtgttgttttatcgcgtttagtttttcgtattcgtcgcgttcgttcgggtcgttcgcgttcgcgttcgtcgcgttcgcgttcgtcgtcgcgtcgttcgcgtttttagcgtttttcgcgttcggcgcgttatcgttgtacgttattttttcgtggttcgttattaggcgtattaggtagtttatcgatacgaagaggtagtaggtcgagaggaagataatgggtcgtttcgggtatttgaagcgttttatgtcgataaggaaggtggagacggtggcgaaggtggatacgaagtagagtatcgattataggtcgatttagaagacggtgaaggcgcgttcgttttggttgaaaaaggggttgtggtagggtagcgcgtagttagcgatttggtttgttttgacgcggttgtagagcgggtggcgttcgttggatacgtttattataggcgcgcggtattggtattcgggttcgtagggagtcgcgtcgtcgttagggggtcgcgttttttcgttatcgtcgtcgtcgcgagttgggggcgtcgtcgcgttttcgtcgttatcgtttttgtcgtcgtcgtggtgcgggggtttggttttcggcgggcggtcgtggtcgttgttcgaaggcggttgttcgtcgggcggcggcggcggtaggcggcgcggcgggttgggcgcggcggtggttaggtcggtgcggttgtagtttatgtatagcgtgttagggttgttttgttcgggtagtcggtcgtagcgtatgcggtcgggttaggcgaagtcgtattggcgtatgagcggcgcgtagtcggttttggcgcgttcgtatatcgagcggtagggcggtagcggttttttgtagttttttaggtagatgggcgtgtatatgttgtataggaagaatttgagatcgggcgagtattggatttttattagcggttagaattggtgtatttttaggttcgtttcgttttgcgtgtcgtggttgaattgattgggtatgtaggtgtagttgtagtcgatgtttttatatagcggtacggtgattttttggtatgttagttttttggtcgaggcggtcgtagcgtcgttagagcgttgtagtagcgttaaggcggttagtagcgaggttatttttaataggtaattttattttatgttgtgcgtttcggttcggtgttttcgttttttaggcggcgcgtagaggggtgtcggggggggggtttacgagagagtcgtagacgggtatagcgggtgatttggggttttttttatgtttcgttcgggaggggggtttgtcgataatttaattttttttaggggcgcgttcgtagcggcgcggttcgtagtttgggtagggttttttcgtattttttttcgtcgtttcgggggtttgaaggcggttgtaggcgcgcgttatagttcgtaggttcgttttgttggtttcgggtcgcgtttagttttcgcggcgtagagcggtcgggtttcggtttatcgtttcgcgttcgttcgtttttttttcgcgcgttcgattattttttttcgtcgcgtcgggcggcggtgatttcgtcggatagagagggcggaggcgtcgtaagttttttttggggtcgcggtgcgtagttaagatggttgggtcgggtcgtttgtcgcgtcgggttagttttggcggttattattcggttttcgggggtttatgttcgtttttaaggttaagtcgtcgtcgtcgtcgtcggagttggggattcgtttcggtttaggtcgtcgtttttttttttcggcgttcgtttttcgttcgttcgtcgtcgggatagacggattttcgtcgtttggaaaagttagcgtcgcgtttcggtcgtagtcgggcgaggtgtatatagttttttttttgttggatatttaggagtaaatttagatcggaaggcggagcggatatttgagtggcgcggttcgcgtttagtcgtcgtttttttttcggcgggagtagcgtttttagtttaatttttcggttttagtttcgttcgcgtcgcgttgtcggtttatgaatatttatatagcgcggattcggttttcgtttttagtttcgcgagttaatcgtcgggcggtagggcggagtttacgcgtttttagggtttagttttttttaaggtagttttcgagtgttcgtattgttgtgcgcgttttttgcggatggagagttttggtaattttgggattgatcgtagagatagagtgttggttatggttgtttttatggcgttgagtgcgtcggaggttttggtttttttatttcgagtttgtttttggggatagggacggggtttggtgtagcgcgcgttttttcggcgcgttttaaattagttaagtttttgttgttatttttcgtaaatgtgggtgatttgtaggcggttggggtttcgtgtttttcggggcggtaggaaggtttcgtagtaggcgagcgtcggggaggtttgtcggggttcggcgttgtagaagattcgggaaagggtgttttttttggggtttttagaacgatggtttttgagatttggagatgtggggggtgtggagttattttaaattggggttggattcgggacggttcgggtgagatgtttcggagtttagttttgggcgcgcgaggggcgcgggggataaatgttcgttagagatttttttttcgttttcgttgcg

SEQ ID NO: 11234 - DNA, 1381 bp, Artificial Sequence
  Description of Artificial Sequence: Synthetic polynucleotide
tcgcggtagcgttagttgtatttttttttaaaaatcggaggaaggagtttgggggttaggtcggggcggtttgtaggtgtgaatatttcggaagtttttggcgttttggtttttaagagtatatttgcggttgtttacgggttttacgttttgcgatagttatttcgtggtttcgggggttttaagggcggtttttcgtatcggggttttaggtagcggaatttttttttagggtttatttataaagcgtggtgtcgtagagttttttacggaggggttttagtttggagttcgggtatcgtttatttttaattcgtcgttagtttcggattttttcgcgtttgtttcgtattacggagtcgggtttttagagtagtaaggttattaggtggcggtgttggcgtagtaggcggagcgtcgggtgcgcggggtcgcgtttttggttttcgaaggtgatgaagatgggtttgcgggtgagttttagtagtcggtataggttttttttgcggggcgggatcgttaggggggtgggtgttacgttggggtttatttaatttcgcgcgggatttatcggaagttgtggttgtattaggttcggtttaggaaggcgttcgaaagtattacgatgaggcgtcggtagcggtttaggtttattaagaggtcggcggagggttttgcgggagggcgggcgtcggcggcgtaggggcgggggcgggggagggcggggtcggaggtttaggggcggtgtcggacgtagagttttaagggaggggcggggtttgcggggtgggcgggtttttgaggcggggtttcgggtgggcggggatgggggcggagttcgatggtgggggtggggtttcgggtgggacggagtatggggcggggcggggcgggtttttcgggtgggcggggtacggggtggggttcgggatattagcgcgcggtaggaggtcgcggtcgtttaggaagagtttgtagtttcgacgtcgttttagttgcggttttaggatgaagtttacgaatttgcggttttcggggtagtcgttgtaggagacgtaggcgtcgtagagtttttcgtttgcggacggcggttagttatttcgatggttttcgaggttttatattagttttcggggtttttaatatttttaattattttttacgtgtataggggtagattcgtttcggattttaattttagtcgggtcgtatagagtattcgggggttaattttttttcgtcgtacgtttttaaagtcgagtttagtagcgtatttttagggaggtcgtggcgattttttttcgcgtttacgcgggttttacgtatcgtttatttttatttttttatacgcgttttggtattagagtagtacgttgagacg

SEQ ID NO: 11235 - DNA, 493 bp, Artificial Sequence
  Description of Artificial Sequence: Synthetic polynucleotide
tcggattcgggggaaatggggtattaacggttgggttttaggagatattcggaggggttcgcgggttcggttcggttttttcgttggggggttattagtcggtcggtagcgagatatttagaggttcgtttttttatcgcgttgttatagtaacggtttggtcggttgcgtttcgggtcgttcgttttatttcgcgggttcgttttgagttagtgattttagggattatttatcgcggtcggcggattggcgggttttcgataggtgcgtatattcggcgtaggttgtcgttgagttcggaattttgtatcgggagaaattttttagttcgtagagtaatcgtagggtagtggacgggggtcgcgcgaggataaatagcggcggcgggtgtaaagttttttttttaagtcgcggggttggtcgggaggtgtcggttgtataacggcgtttacgtgatttaggtgtagttttaggcgcgtttaagggtagttcg

SEQ ID NO: 11236 - DNA, 922 bp, Artificial Sequence
  Description of Artificial Sequence: Synthetic polynucleotide
tcgcgggcgttttgtagggatggagattgagagaggttagggattcggtttttttgggaaaacgcgcgggcgttttagtttttcgttttgcggtattttatttgttttcgaggattatcgttaagaagaggtttcgtcgtgttattgatattttatttcgttttttttcgcgaggtgttttcgagttttcgaggacgcggaacgtcggggtttttcgtcgggtaagtattagtatttagatttcgtacgtagttttgtatttttacgttttttagggaacgtcggttcgttcgttttcgggatttttcgttttttaagttaaggttttttaagtttagtgttcgcgcgttattttttttttcgattttgcggcgggatttttattttcgtattttttcgcggggttggttaagtttttagattttttgcgttgtagtcggttcggaaagttatttttaggttattttttcgcgcgcgcgcggcggcggttacggtggcggcggttgcgattcgaacgggtttttttatgtatcgcgtagggtagaggagggagcggcgtttcgtacgtcggggttggggcgttgggtagggcgggcgggcgtggggtttcgggttttttcgtatttagtcgcgcgagtcgggttttcgggtttaggggaggggagttgaggggcggagttatcggggcgcgttttcgcggttgcgttttttttcgtcggggagcgcgggtacgtaattcggagggtgttgggtcggttcggagtacgcgagtagcgggaggagggatcggggaatgattgacggaggcgggtcgtagaggtcgttgtgtttcgtcggttcgtattcggtcggagtgtgcgcgcgtagtttgttagattagcggcgggggtacgggtcgtattaagtgacggaggggggtacg

SEQ ID NO: 11237 - DNA, 719 bp, Artificial Sequence
  Description of Artificial Sequence: Synthetic polynucleotide
tcgtttttttggtatttacggcgtttttgtttgtttttgttcgggtttcggaggcgcgaatattattttaagtttgcgatcgcgcggtattattttcgttttttttttttttttatttcgttttttttatttttttcgggagtttttgggagtcgggtcgtcgtgtgcgtaagcgtgtttagtttttttttcgtttttaattcgggttcgggttttcgttttttttgtaggcggattcgttcgtttttaggtcggattcgcgttcgggatagggattcggtcgagtcgagtcgtcgcgttagcgttgcgtcgtcggtcggtgcgtttagcggatcggagttgcgcgcggaatcgtgttgtttcgtttcgttttattcgtgagggtgagtacgcggcggcggtgcgcgggggtttgcggggcggggcggggcggggagtcgcggggttttcggtcgtttgattttagtcggcgtcgcgtttttcggagggggtcgggttttgtacgtgggcgtagcgcgggtcggggtggggttgttatagttttgcggagttgtttttcggggtttttttttttggattagattttcgcgggaagtcggatttttttcgtttttttggagtgagtaagcgggatagttttgcggaaagttttcgtttttaattttttagttttgcgttcggattgaagcggcggtttttatttttagtattttcgagcg

SEQ ID NO: 11238 - DNA, 958 bp, Artificial Sequence
  Description of Artificial Sequence: Synthetic polynucleotide
tcgcgttgttagtatttcgtatagttcgttcgaaatattagggaaggggttcgtaggtgtgggggtggggtggcgaggttaggtagtttggcgcgagggagagagtcgaggtttgggttaggaaggtttttgggtgtcgtgtgggcgtagagtttaggagagcgtattgttaggttcggattttttcgtttttatttcgggaagaggttcgttcgtcgtagggggaaggcgggattatagtatttcggaggagcggtcggttcgggtatgcgggcggcggggcggggagggaggttttcggaatttcgagagagtattcgtgtttcgcgggtttcgtgtttcgttttcgggtttttttttttttaacgtaggggatttagttcggggtagtgtcgggtattggcgttggcgtttcgtttagttttgcgattttttttcgtttcgttttttttcgtttcgtttcgttttttttcgtttcgttttcgggtcgtttcgtttcgtaggttcgttattttcgggtaggtttcgttttttgttttcgttggcggcggcggcggcggcggtgtcggagcgcgagtagagcggagatttttaggttttgcgggcgcggtgagtgcggttcgggcggcgggcggcgaggcgggtttcgagagcgtgcggagtcgcgcggttttgagtcggcgtcgggcgggttgggtatttttaggtcgagattcgagaagggggagcggtcgggggcgtttacgggaggtagtgtgggtagggcggcggtgggacgagaggacgaggaatagagtaggcgtcgtgcgggaagcgggtcgggaaggggagggtgggtgcggggttcgggtatcgagcgaagtggggttttttaggggatggtttcgaggaagatcgttttagaaagggagtaattcggggtcggtaagggttttcgattgtgtgatttcgtgtatcg

SEQ ID NO: 11239 - DNA, 3843 bp, Artificial Sequence
  Description of Artificial Sequence: Synthetic polynucleotide
tcgtaattttgacgagaagggttttttcgttgaaagtttaattgtagagcgttcggagcgcgttgtgagttcgtaggaacgcggtcgggtcggggacgggagaaaggcgcggtcgggattttgtattgtgtcgcgcggcgtttgcggttggaatttggtttggaacgcggttttttcggttttagtttttcgtttaggtttcgtttattcggtcgtttcgttggttcgtatcgttgtttcggttatcgaggagtttaaagttggcggcgtttcgcggatttcggcggagagcgcgagggagtcgcggtcgatttttgtattacgaagataattggaggtcggcgggggaggcgggttacgaggggttggggcgagggagttgggatgcgcgggttcggttcgtcgggaaataggttgtcgcggagtttcgttttttttttttttgcggttttcgtcgcgatttgattttcgttttgttcggggagttaatttagtcgttttcggggcgttttttttttttttggatttttacggttggattagagtttttttggtagtcgggttaaaggtttttttagtaaggttaaggcgcggtcggttggtatttggggatttttttttagtcgagtattggttttttaatcgtattgttaaggattatggtagcggtaggaaattcgaagggttttataggtttgcgggagggaggatttattttatagtaaggaatagatttagatagatcggggattttagtgggaggggacgagaggttttaggacgttggaatgtggtaaaaataaaatattttttatttatgtatattattattttttgattgcgggttggggggaagggagtttagggttaatgtgttttagattttagcgttttttacggttgtgttagggttggggtggtttatttttttatagacgaaaattaagatttaaaagtatatttttattgtggtttttttattaaagtttattaacgtgatatataggttgcggcgttggagggaagcggcgaaacggggagaataaacgtaatagaagtaaattgttgtttgtagaggcgagaggcgaaggaacggaagttatattcgattttagttttatttcgtttttattagcgtcgggttagcgtaggaaattaggaataggtgtaggtaagggtggtagttcggtagagttagcgttttattttttttaatttttcgttagcgtgggtttggatggttgggttgtttgggtatttttaagggggattaggtatcgcgggtaggtttttaaatacgtgaagggtatagggtttgaaagataaggaggggcgtttaggaagggcggaaaagaggggttttggggttttttaggatattaagttagtttttgaaaacggcgttttttggaaggttttttaatattttcgagggaagatttggagttttgaagatttaatgaaattttagttttgattgattttttttttgcgattaatttcggatgtttttatttagtttttgtttcggtaatcggttttttggggatagtagtattagtattcgacgtttatcgtataagtgggcgtcgtggtgcgaggcgtattttagttatttaggtcggggtgggggcgtttcggtatttatattttttaagtaggtaaatttttaggtttgtttttcgagaatcgggagttcgtattatagtttcgggtaattatcgaggtagtttatgtaattgttcgcgatgtcgtttagtagatttttttttttattcggttttagagtttagtatatgggtatttttttttttttattttttatttcggcgattggaatttcgagtttgttttattatcgttttttataaagtagcggggtgatttcgtgtgttataaatattaagttagtatgtaggtttaggtaaaattttggttgtttttttgcgttttttttattgcgtcgatggtttatagataattgtatttttataaattttttttttacggttagggggtgggagggagttagagatcgggtgggggtttggcgcggtattgttgagggttttgtatttaattgagtagtaatatatttatttatatggacgcgggtgtataaatcgttttaatattttgttttgaaagcggagttaatttttaaagttaaggattacgtagttgaatttttagtattttttaatttcgtttaggcgggggtaggtagagaaggggcgggtagcgggtagttaattcgttcgattttttcgttaagaaggatttattaggtgaatttttcgttttttatttaagtagttggttgtgtatttttcggttgcgtgtgtgtgtttatatatatatatatatatatatatatatgtcgttttattattttttagtttgtttttttaatgtaacgatcgtatttaaaaatggtaattaaaatgattgaggagttcggtgattatattttaatttagagtatatttttcgaagttgggggtgagagtagttatatagttatatttatattcgggagttttttaagcgtttatttggcggttgtagttttagttggtttttagacgaatattaatatcgcggtcgggcgttcggtgaggagaggcgggcgtttcgcgggttgtagagggcgaggagttggggtcgtatttttaggatttgagttttaattatcgttcgtgcggggttgttgtagtcggtatttgtttcgtagggtaggttgtagtcgttgaagttcggcgtcgtttcgcgggtttttttagcgttcgacgggggtttggggcgagttagtttgtagaggggttgtaggcgatcgggtcggggcggggaacgggattcgggagaggtagacgaatttggggcgcgtcgttttttttttattcgttttttatttttttgtttttttttaatttttgtttttaggttttagttcgcggcgggtttcgggggttgcggcggttttaggttttagaatagtttgttttttcggttattcgcgttttagtttttttttttttgggttaggggagtaagtaaatatttttcggagttttcggtagtcgcgtgagttattcgaattttgttcgggttagtagtgtagagggcgatggagttggcgaggcgtcgtcgcggtttttaaggcgttttttcgtagagcggattacgtcgttttatcgtggttgtaggttgttatcgtcggggaagcggcgaggacggcggtagggaggtaaggcgtcgcgtcggtggtttttttttttttcggcggcgcggtttttttgtttcgcgagtcgtagcggggcgtttaggaaggagtaggttcgggttttgcgtttagttttagcgagattaataatagttttcgcggggagcggagttttagcgagtttttagtcgcgcgcgtacgatcggttttcgttttcggtcgttttcggtcggcgtttttgttagtattgttgttttatatgaaatagttgtaatttcgaggtttttggggggttggggcgggtgtgtgcgcgcgcgtgtgtgagtgtgtgtgtgtgtgtgtgtgtttaatagtttttttttttttttttttttttttgtttgttcgtttgtttgttttcgttttttattttcgtttttttatatatagaaagagagggcgagcgagagagagatatatatatatacgtatacgtatacgtaggttatatgaatgggaggcggtagttaattttacgaggtcggcgagtcgcgcggcgtattggcgttgggagtagggtcgtatttcggcgcgggggggcgttacgtaggtgatgggcgttttttcgggggttacgcgcg

SEQ ID NO: 11240 - DNA, 384 bp, Artificial Sequence
  Description of Artificial Sequence: Synthetic polynucleotide
tcggaagtcggggggcgggtttttatagttattgttcgttattagttcgttattgtgtttatatagggtgatttgatttcgaggcggtggaggagggaataattttagagagtatattttgtcggttcgtaggacgtttgtagtcggtaaatttttggtcggaacggtatagatcgtattttcgtaattcggttttcgggttagattcgtatgcggacgggtatcgtaagggataaacggcgaggcggaatttaacggaagtgaagaaaagattaacgggaaagaaggacgagtacgcggtttcgggatagatttttaaagtttttttttgcgttttttggcggtcggagggggagtagcgcggatacgtttttcggttaatcg

SEQ ID NO: 11241 - DNA, 1432 bp, Artificial Sequence
  Description of Artificial Sequence: Synthetic polynucleotide
acgttttgcgtttttagtcggggtttttttattcggcgtcggcgcgtagtatgtcgggagttgtagttttcgcgaggtaagtttcgtttcgtttttgtttgggggaggaggttggagagtcgttttgtcggtttttgaattttgtcgcgaaaagcgcgcgtggcggttttcggtttcgtttttcgtaggacgcggtgtcgcgttattttggtaatcgttttttagtcgtcgttgattgggttgggtcgcggggggcgggcgggggacgagacgcgggggttgttgtcggcgttcgcgtttgttagtcgggttagagcggagtagcgggtaggattgtttggtcggttgtttcgcggagaggttgcgcgcgtcggtcgggggaggcggatagtcgggttcggcgtttgtggggcgcggcgcgcggtattcgggtttgagattaggcgaggcgtcggcgcgcgttagacggcgcgaggttgcggtttcgggagttttcgcgcgtcgttcggggttatgggcgcgtgagagtttagcgcgcgcggtttttgttgcggtttgcgagttcgtatattcggtgtatagtttttcgggtcgttttcgtgttcgttttgcgttattgggatcggttgttttttagcgtcgaggttttcgaggttgtattcgagtttgcgtcgttcgttgtcgtcgtcgtcgtcgttgtcgtcgtcgttgttcgtcggttttttttttttttatattcggggtttagagtaggaggaggaggggtcggtgtattttcgtcgttgttttttgtaatttgtaggggtcggtgtatgttcggcgaggagtcggggtcgttgcgggtgcgtgtaattttcgaaggagataatttttttatttcggggcgaattcgggggttgtaagtcgcgggcgggcgggcgagcgagaggaagtaataaagataggttgtagttggggttggcgaaaggggtcgcggtcgtcgggtttttagcgcgggcggagagggcgttttgggagcggcgcgggtcgagttgtagttttgagcggggtttcgaggggaggcgtagcgtcgttcgtcggacgtggcgattacgggtttcggcgaagatgcgtcgtttgagcgttcgcgcggttttcgttcggggcgggcgtgatttttgttgaacggagattttttttttttttcgatttcggacggcgtaggtcggcgttaggatagtttttatcgatagcgtttttttttattcggagagaggtatcgatttttaaggagggtttcgttaggtagtttttgttatttttgtatggttgcgattcgtcgagcggagcgtcgtggtagttgagatttggtgtttttcgacggtttggttgattcggtgagttgtgcggggcggggttttgcgttggagttgggggtattttttggcgttcg

SEQ ID NO: 11242 - DNA, 325 bp, Artificial Sequence
  Description of Artificial Sequence: Synthetic polynucleotide
acgttagcgaaggtcgtttcggcgtattttagataatgagcgtagtgtgtaggagcgaggggttggtagaggttaggaagtttttggggttaggcgcggttttttatttttacgttagataaagagcgcggggtttggggagttggcggttttttcgttatttggggcgtttggggggttttggggcgggggaggcgggggttttgtttaatttcgttattgttattatcggttaggtcgcggtttggtaattcgtgaataggaggtagggttgtagggcgtgagggatgatgataaggaagtcggaggagtagcggcggtagcg

SEQ ID NO: 11243 - DNA, 1242 bp, Artificial Sequence
  Description of Artificial Sequence: Synthetic polynucleotide
tcggttttggtttcgtttcgtacgcgttggtgttatagttgtggtgtagacgttttttcgttgcgagggtgcggtcgtttcggggcgagtgtttttcggtttgtaggaggcgaattcgggttttttcgggaggcgttcgtgggaacgcgtatttgcgagtttttgtcggttgaggagtcgaggtttgcgatttttgtcgatttgagtttaggcgtagtagcgtagatttggtcgtcgtattttttttggttgggatgcgggtttacgcgggaaaggttgaaaggtggggaatatttcggcggaaaggaattttttttttttgttttgaaggaaagttttttaatatagttatgtttttggtggttttcggttttttatttttaagtttttagttagttttatatttattcgttttagtagtcgcggagtgggggtttttaaagaatttagttgtagagtaagttcggttgacgtagtgtgcgttgggggcggggttttggacgggggcggagttacggcgagagtcgcggtgagggcggggttcgggtgggcggtgttttgagcggggtttttagtgggcggggttttggggtggcggtcgttgtcgggttacgggagagcgcggagttttgcgttgggaggtgtacggtgtgtacgttggattggatttttatgtaatttcgcgttttgcgttttaattaggattgtttcgcgcgtttttgagtttcgggtttcggttcggatttgtagttttttaggtggttgggaaggtaggtgcgtcgttgttttcggcgcgcggcgtttcgcgaggtttttagttttcgttttggtggattttcgttgggtgggagtcgggagtggaggcggtcgttttagggagggaggagcgtaggcgggggttgtttacgggcggagtattgcgcggcgaagggaattttcgaaggggttgatcgggtttcggggtcgtgataggcggcgaggcggtgggaggggagcgtgtgaatttacgtcgggttttcgcgggcgacgcgagcgacgcgatttggatttttattcgggatattgtaaatagatttgtttgtgaggtttacgattgggagtttgttattttgtttaagttcgattcggtttcggcgttcgttcgcgttttgcggaggttttttgagttagcgcgcggttgtaggggtttcggggtcgtatttcggattagcgttagcggcgggagagcgttgtttgtgagcg

SEQ ID NO: 11244 - DNA, 1460 bp, Artificial Sequence
  Description of Artificial Sequence: Synthetic polynucleotide
tcggggtagtcgagttatttttttaaagtcgattttcgggagagatttttagttggacgtttttcgttttttaggagcgatggttgtaattatttcgttcgtttttacggggcgtttttttaatttttcggttggttttttttttcgtagggtttttttcggtttatcgttttttttttgcggttttttcggttttttaggtcggatcgaggttagcgtttgatttttttggtttttagtttgtttttttagtgtttaagagcgagaatatcgttttcgtttatatgtaaaggtcgggcgtagtaaatgaagtgggaaaagagaaaaatagataaatcgttgtggtataaaagatttttttttcgttcgttttgttttgtagttcgggtttagtaggagagggttggggagaattggataaacgttttggaatttataaaggtcggtggtgtcgggggtcgtaaagggagtgaagaattgaagtagtgagttggataaattcggggtaaagtattaaataatatggatattttggtaacgcgtgcgcgtgtgggtgggcggataaaaggatttattattcgtatgattgttttaattttttattttttttgtgtacgtgtgtggacgttgttttaggttcgagttcgtttttcgtttaggacgtatagtttcgggtcgtggttttcgcgcgttcggttgtgcgtttcgggtttttggttcgcgcggtagttatagtttggcggggtttgcgcggaggaggtcggttaggcgtaggttgtcgattttttttatttcgtttagagtagtgcgtagtttttgcgcggacgggtagagtagtcggcgcgttagttcgcgcggtatcgtcgttcggtcgttgaagcgcgcggcgagtacgaaggggaaatcgaagcgcgcgcggtattgcgcgttgagttcggttagtcgtagtcgttcgttcgcgtttaggttttttaggtttgcgtcgttttgttttcgttgcgattcggtcgtgagcgtgtttcgttgtagttcgttgttcgttaggttcgggtggtagcgtaggatgtttttttggtttgcggagaagtatagatatcggcgggagcgcgttaatcgcgttcgtttcgtatcgcgtattcgagggggcgcgtaggtcgcgttcggtttttttgtttcgtttcgtttcgttcggttttaaagaaggttgcgggagggtgaagtagagtatttaggcggtgatgttttggcggaataggggcgtttttggcgcgtttttttaataagttttggattttgcgtttttcggtttttattatattcggtcgggattaggatttaggggcggggcgggaagtgatacgtttgttttttgagattttgggttaagaagagcggaggagagagagggcggtcgttgaggttcggaatttacgattaggtcgggagggagtagagacgcg

SEQ ID NO: 11245 - DNA, 1064 bp, Artificial Sequence
  Description of Artificial Sequence: Synthetic polynucleotide
tcgcgcgattgaggcgttagcggcggagttggacggtttgggaaggtttcggtttttcggttgcggttttagttcggacggcgtcgcgtaattttgttatttttttggtttagtttcggttataggaggatttcgcgggtaacgcgcggagtttttggtatttttcggcggtgttttttgttgtttgttcggggatcgatttcgtatgtttttaggttgatttgtttaagttcgaatatcgggattatgtatttagtcgggattttcgggttattttcgcgtcggataggtaattttattagtttttaattaggatcgttatcgtcgtttcggttgttgttgttgttgttgttttttttgttattggtaagtcgcgtttcggtatagttcgttgttttcggtagggcgttgttgttttttggtttcgcgggggttgtaggggtttttgttgaggaggttatagtgttggcgaatcgcggatttcgggtgtttttcggtcgtgaagtttggttggattttttgtatgatttggtgttgtaggtgtagttcggggatcgttgcgcggtttcggtattagataacgacgtattggtttagcgatcgggtcgtttgagttttaagcgtttttcgtgcgattttggttttggcgaggtgcgttatttttatttgggcgcgcgtagttcgtttcgggatcgcgttcggttgtagttgcgttatgacgcgttcggaggggtagtagtgttattattggtattggaggtggaggtggtttttatttagttggaggttgtgattcggaatttgtttttggtcgtggaagagttgttggggattagtaatgttttggacgcgcggagtttggagttcgttttttagttcgagatagaggagtgtcgcgtgggtattttgttcggtttgggcgcgttgtttcgttatggagaatttttttattattcgtaggtttttggaggagttagagagggaggcgtttcggagatttttttgatggattgtaaagttttttaggaattaggcgtgcgttatcgttatatagtcgttagtcg

SEQ ID NO: 11246 - DNA, 622 bp, Artificial Sequence
  Description of Artificial Sequence: Synthetic polynucleotide
tcgttagttagacggtgtttttgtcgtttttgtcgttattcgttgggtttcgtttcgttttaagcgtattttcggttcgtagggtgggaatacgaggattatagtgttttacgggcgggcgggttaggatcgtaatttcggcggagtcggcgtttttgggtatttttggttttcgcgtttcggtcgtacggtgattattcgggaggggatttcgggcgtttcgtaatttttcggttttcgtgggttttcgggtcgtttcgtttttcgtcgtcgcgtatttttcgcgtttttcggttttcggtgtcggttttcgtttcgcgtagtttcgagtttttagttcggtcggttttttattcgtcgagcgtatttatggcggcggtttttagggtttttgcgatttgtcggcgggacgtgtttttggtaggtgttattttttcgatttgacgtttaggttcggtttcgttgttttaggtatagttttagttttgcgaggcggggtcgtcggttttattcggggggcggtgttgcggggagtagaggttcgtgttttcgagtcgtcgcgcgtggatattagtttcggtttaggtgcgggtgggtttcgacgggagcgcgtggtaggtcg

SEQ ID NO: 11247 - DNA, 1622 bp, Artificial Sequence
  Description of Artificial Sequence: Synthetic polynucleotide
gcgtttttaaaatcgagtttatcgttttttttttttgcgtagtttttatttttttttgtgtttcgtattttaataaacgttttcgttaagtgattttagtttgaaatatgcggtttttcggatttttttttgtgttatcgattttttgcgtttagtttttcggagttgtcggtttaatttcgtaagttttttcggaattcgtgttttttttttgggtagcgttattattacgagcgtttatttgagaggacgtttgtttttatttagtttttattttgtagtcgagtaattttcgtaaaacgaatatttggtttagtttttgttggaaatcgttgaatagtttttattgttttttggaagggtttgggtagttcggcgtggcgtttacggttttattaggtttttgttttttgtaggtttcgttatttcgttattaaagcgttcgtcgcgttcgtatttgttgtgaggttgtgttcgggtcgttttcgtcgagggaacggtttttttaaggttttgcgttttaattttcgttcgtttgttaagaggtagtcgtgtcggggagttagagtttttcggggatttttttttgtttttcgtggttttttgtggaattttcgttttaggatttgtacgtcgtttttagtcgcgcgcgcggtacggagatcgttcgttgtgtttcgcgttgcgtttttttcgtttttttttcgcgtaggtttttttgtgttagtcggttgtcgatttaggttaggaagttcgaggtcggggcgttattttaagggttttttcgtttttttttcgagggtagagaggcgttcgcgttcggacgtattgcgggaatatttggagcgtcggcggagttcggttgttttcgcgggagggagttcgacgcgtatttttgggattcggattcggcgttcgcgtttcgggacggatttttgtttcggttgtaggcgtagcgcgtagatttgagtttgtttcgcggaatcggggttcgagtttcggttcgagcgcggcgtcggggttagcggagaggggcggaagtcgtaagggattttcggcgtttcggtttggtcgcgatgaagttttcgtttttttttaggtgacggatcgtcgttgtcgtttcgggttgtttattatttcggcgcgtgttcgggagtttttatttttttcgggttttgtggtcggttacgcgttttaggtacgcgtcgcgtcgggtcgcgttattaagttcgttgtttttagtttttttcggtagattttttggttatttttattttgcggaggggtcgtttattagatgttagaaaattagggtggggtacgtaggttaggggttttagcggttgggtatcgtgtttttttcgaatttggtgttggaagtgcgttcgttttcgttttttttaggtatttatcggtattgtttagttttgtttggagggtttaggattgaacgtttgttttcggtttttattttggttgtagaggattggtcgggtgatgtcgcgttgttttggttttgggttcgtttggaagattcgtttgtgtcgcgggttttttttttggttttggtttttaaagcgttttcggtatagtttttcggtttttgtagttcggtggggtcg

SEQ ID NO: 11248 - DNA, 324 bp, Artificial Sequence
  Description of Artificial Sequence: Synthetic polynucleotide
acgtgggttcggagtagggggcggcgttcgcgtttgattcggtttgtcggttgtttgtcgttcgcgtaggagttggtcgggcgtcgtttgtaggttgtttcgggtcgagtcggagcgacgttgtcgcgtatttgggtagttttcgggggtcgcgttgtgttacggtcggggtcgttgcgattgcggcgtttgtatttgttacgtgattgagtcgggtatgtttttcgggtttttgtgtgagtgttatgagtgggtgtgcgagatttacgacgggagtatttgtgtaggtaagagggcggcgttgttttttttttcgggaggtcg

SEQ ID NO: 11249 - DNA, 1881 bp, Artificial Sequence
  Description of Artificial Sequence: Synthetic polynucleotide
tcggggttttttagtttcgtcggggcgtttgtttttcggttgagttcgttcgtagcgcggttttcggttattggcgaggttgtgcggaattagaaggtcgatcgcgttcgggtatttttcgcgcgtttttgattttagttcggtttttcggaagtcgtttgggcgatttcgcggtttaatattcggttttgcgaaatcgttcgcgttttcggttcggtttggagggtttcgtattattcgcgcgcgcgcgcgttcgtataggattcggttaataggcgtcgggatttttggagttcgttttgttagaaatttgttacgcgcgtcgtcgtatatgcgttttaggttttttcggacgtaggcgttatcgatttcgttttcgtttcgcgtttttcggttgtttcgtcgcgatttcgggtcgcgagcgttgtcgtataggcgttttaggtttttcggggtataggcgtcgtcgatttcgttttcgtttcgcgatttcggtacgttttacgtttttcgtattttagattcgtttttttcgatttttattggatagtcggggaaaatggcgttttaaagcgttcgtatttattttgtcgaaatgcgcggtttagtgtacgggcgtttagttatagaaggagtttttagaggttaggtgggcgtggggtgtttgttgtagtagcgagtagagcgtggttaggttttcgtcgcggtaggcgcggtgtagcgggaaacggagcgagagtagtttttcgttggagaagttcgtttttacgttcgcgttcgttttcgtcgtcgatatggttcgttatcggagagcgcggggttcgttggtttagaggacgcgtcggggaggattcgagaagtcgtcgtcgtagtataaaggaacgagattagcgtcgcggtcgcgttttataggttgtcgagcggagcgcgtatagagggggcggggcggggtttggagcggtcgggttgggggcggggtttggtttagaggacgttttgtgtagtcgggtaggggtcggggtttggagtcgcggatttttggagtcgtcgggtagggggcggggtttgagtcggaggtcgtttggagtagtcgggcggagggcggggtttggagttgcggacgtttggagcggtcggtaggtggcggggtttagtttagaggatgtttggagtagtcgggtagggagcggagtttggattagaggacgttagtagtagtcgattaggaggcggggtatggggttgtcgacgtttggagtagtcgggtattgggtttgggttagaggacgtttggggcggtgggcgtttggagtagttaggtagagggcggggtttggtttgggtttacgtttggggcggtcgggggcggggtttggttggaattgacgcgtggagtttcggtggagggggcggggtttggttgggtcgttgtttatagcggttttcggggtttggaggttacggggttcggaggttacggggttcggaggttacggggttggttgtgtggggggtttaggggcgtagagtggttaagtagcggtttgagcgggtttcggggttttcggcgcggtgggtttcggttgcgtttcgggtgcggattatgatgtttttagtttgggagtcggttcgggcggggaatttcggttgtcgggggcgcgggttgaggttttgcgggttcgcgtttagagcgggtgggagttacgggtttttcggaggtttagtagcgcgcggtgaagttgtttagtaaaaatttatggagcgtttacggggagtagggattttcgttaaaatttgggaattagtaagttttagttttttatagagtaggatagatttttcggttttgttcgagggacgtttttttcggaatcgagtgcg

SEQ ID NO: 11250 - DNA, 944 bp, Artificial Sequence
  Description of Artificial Sequence: Synthetic polynucleotide
tcgcgtggggtttagggaggcgcgggttgcgggggattgcgtaaggtcggggtttttggaggtcgaggtcgcggtgtttttcgcgaggttattatgagttgagtgtttttggtaggcgtttagggatttttcgttttttttttttcgcggtttcggcgggcgtcggttagatcgtttcgttttttcgttagttcggaacgttttgtattttttttttcggttgttcggcgttcgttagcggttagaaattttcgtttcgttttatgtaatcggggatttcgcgttttcgttgtcgtttcgttttcggtttagaggacgggtttggggggagggggcgtgtggcgacgttgttatttattagggtttagtcgtcgttttttcgagttgggtcggtgtttcgcgcggttttgtagttttgtagcgttcggggcggtgtaggagtttcggggtgtcgcggcgttcgttcggttgtatcgttggtttttcggttcgggttttaggttcggcgttttttatttttaggtcgcgcgcgtttcgttttttcgacgatttttagtttcgggttttcgttatttacgagttttcgttttcggtgagttgttgtttttagggtttcgagtcgcgcggtattttttgcggttcgaggcggattttttgtagttttttgattatttgttcgtatttttcgttttttatggagtttaggtcgttgtcgtggcggtcgtttagtagtcgttttttttttagttcgtcgcgggggttttttatggtttatttttgggggcgttcggtcgtttggaatatggcgcggacgagttgcgggcgttgttgcgggtgcgttgggtcgcgggttgcgcgttgttttttcgttggggcgttggcgggcgggacggcggtacggattgttgtgggttttgtagcgtcgtcgcggcgttttataaacg

SEQ ID NO: 11251 - DNA, 1514 bp, Artificial Sequence
  Description of Artificial Sequence: Synthetic polynucleotide
tcggcggcgttttttttatttagcgtgaaatttacgaggcgcggcgtttcgagtggcgggcgggtagggggttgtaggatttacgaagttattttcgtcggggatcgttttttttcggagtggtttttttttcggcgtttcgttttagtaagacgatatttaggttaaatagtcgttttcggttagttcgattcggttttggagggagcgtttcgagggagtttagtcggaggcggagaaggttattcggttagaaggtggggagtcgtcggcgttttttcgtattttcgtttttatagtagggggaaaggttttgatcgtcgtggtttatattatcgcgtttatttgaggttcgtttcgttttttgggtttttagaggggtggcgtatttcgtttttttttgtttttaagtggtcgtattttttcgcgggacgtttggttgggtttagggcggggcgggcgggcgtttttcgtattgtcgcgagtttagcgcgtagttttcgcggttcggttgtcgtcgcggttagttggggcgggtcgggggcggggttttagggggcggggattcgggggggcgggtcgggtcgggaggcgtgggtggggggcggggcggacgcggagcgtttttttggttggcggggttaaggggttgagaggagtggggtaggttcggcgtcggtaggaagagttagaggggtgattagagagtttaacgtttggtgtttaagatttttttcgaggtatgaataagaattaggcgtttgggtttttttcgttcgttttatcgtttagtcgtcgcgtttcggacgttcgttgtgttttttgtcggcggggcggcggcgggattgggtttcgggagggtttttggaagtcgcgagttttagcgaaggtagtgtatcgtttttcgttttttttttcgtttttttttcgtttttttagttttgggtgtcgggtatcggtggtaaggtcgttttttcgtgagtcggaggtcgtttattttgggacgggcggacgaggttttagggtagtcgagttcggtagcgggggaggcgtggagttcggggcggttttagcggcgggggcgggaggttggttttggttgtagattgcgcgtttgggtttcgtgcgcggtttttggttttttgtatcgcggaggttttcggattatagggttttttggcgggtttcggtatttaggtttgtgtcgttgtggttgggcgtcgggattagtattcgagtttcgcgttttcgggggttgcgtcgtgtcgtttgttgtgcgcgcgtagaggtcggatagttcggttgcgggaagggattcgagcgtagggtttgtttcgcgtttcggaaagtgtttagtttgcggagtcggaggttgagttggggtagatcggcgttagacgggggtttgggtgagatacgagttgggggtgcggtttgtagaatttgggtttttggaggagtttacggcgcgttggcggagttttaggcgaataggagtatcggattcggtttcg

SEQ ID NO: 11252 - DNA, 2144 bp, Artificial Sequence
  Description of Artificial Sequence: Synthetic polynucleotide
gcgtcgtttttttttcgcgtttttcgaatgttaagtgtattagtttttaattttttttttgggcgggttcggtttggttaattttagttgtagattttagtataaatttaggattttttttcgtttagtcgtttttatataaggattcgtcgaatatattttgaatttcgcgttagagcgtagttcggaattgtagttcgcggcgcgggtttaggtcgggggtcgcgcgtttttagtcggtgatttaaggtcgttcggttcgggggtgggtgtgggtcggtaggatcgattagggtcgcgcgggggtagttgtcgggcgttcggttatttagcggtgggagtcgaggttggttttggttagtcgttatttcgtcgcgggcgtttgtttcgtcgggttttcgggcgcgggaggaaggttcgcgtcgttttttattcggcgcgttttttttttagtgcgtagtggtttggtgggttagtcggcggcggttggagcgcggggtcggttttgcgtacgaatgaatgggcgttcgggggacgcgcgcgttcggggttgaagggtattaggatcgtgaggatcgtttcgcgattttgtttttttttattattttttcgtttttttattttttttttttttttgttttgtaggattgagtagttaggcgcgagcgaaaataaatagttggggttgcgagcgttttcgtttcggtttcgagagtacgtcggtttagttttttatttggggcgttcgtttgtttattatgaggaagattcgcgttaatgttatcgttattttgatcgtagtttggattttgggtattttttattatttatggtaggataatcgagtttacgtagtatttttcggcggtcggggcgcgtagagggtaggtaggaggtcggagtagtttcgcgaggatcgtattatttcgtttattgtgagtacgtttcgagcgtcggtcggtcggttagggagtcgcggcgcgcgtttagattttgcgcggcggtcgagggcgcggggttcggttagggttgagtgttcgttgcgtcgggtcggttttgtatatgttggagtatttttgttcgttgttatggtaatttttgtcgggcggcggggttggggcgtatcgattaagggagggtgatagagggtgggggttgggagaaagtgttgtaagtttggtgggttcggcgtgcgcgcgcggttgggaacgtggcggttttttcggttttgcgttgtcggggtcgggagtttgggggttgcgggagtttcgtgtgtttcggaaggttgtcgggtttagcgcgcggcgagcgggcggtgggaattattcgtagtcgagcgcgtaggtggtagtgcgtagtttttttttagttttttgggggtagaggatatcgggtgggggcgtgggtaggggaaggttttttaggcgttgcgtttggtttcgaatttttttttgagtcgggttaatttgaattcgttttttcggcgcggatatttagttttttcggagttttttgggttgaggagaggtttcgtattgtacgcgttttttatttttaattttagggttcgttattacgggtaggtgggtagtgttagcgttcgaatttggcgatatttttgtatgaagttagtttcgcgatatttaagcgggtagggaaataaaggtagtgtggtatagcgggggcggcggcggggttgcgggggtttttggcgttttggggattcgggcgggggcgtgcggagtcgtagtcgttttgtagggggcgattttgtcgtcgttttcgttcgagttttaggtgatagagttgtgcgtggttaggtaggggtatttgttgaggcgggaggttttggtattcgtcgagagtgcgttcgagcgggcgtatttttttagacgggggcggttggtggacgagagtttcggacgattttcgggaattattagggcggggtagtttggtcggatgaggattaggaagaggagagtcgagtggggcgggggtaaaggagtgaggaagcgtggcgatttcgataaggaaagatttgggtttgggggtggaggggtgaggagattcgcgggggaggtgtaaggttcggagggttgaggtttgtgtggagtcgaattcgagaaacgtatttagacgcg

SEQ ID NO: 11253 - DNA, 379 bp, Artificial Sequence
  Description of Artificial Sequence: Synthetic polynucleotide
tcgttcggcggggcgtttttacgttgtgttttttgcggtgtatcgaggcgtattcggttgttttgttgcgggttttttggttatttgtgggttatagggagagacgcgtttatatattttcgttcgcgtttaggatagttgcgggagtttcgggtcgttttaatttaatgcgtttttcgtaggttgagatgcggttgtttttgttcgtgtcgttgttgttggttttagcgttcgggttttcggtgagtgcggttttgtttcggttttcggaggaatttgtaggggagtcgggggcggggacgcgcgggttcgtaggtaacgtttttaggaaaggggcgatgttagggaagttgggttgggaggaggcgagttcgtatcg

SEQ ID NO: 11254 - DNA, 637 bp, Artificial Sequence
  Description of Artificial Sequence: Synthetic polynucleotide
tcgcggtacgggagtgcgtacgcgcgtcggaggcgaaggaggaatttatcgtatttatagggcggtcgagtgagggagttgttggcgggtgggtttggtaattttttgggaggtcgacgcgggcggatcggcgggtgttgggaatcgagtttcggtttgcggtcggtagttttcgtgggtttgtgaagaggtcggcggtttttgcgggcgttagttaggtaagtttagttcggtgttttttaggaagttcgtttgcgggcgcgggtagggagtcgtatcggttatggtggttgaggagggagaggttgttgttcgtcggtcgttcgattttaggttttttttcgacgggttcgtttcggggagtaggggtgcgcgggggttgtttttgcgcgaacggttcgggcgggggacgtggggcgcgttgggcgtcgttcgtcggtttaggcgcgcgaatttggcgtttttagtgaattattcgcggttcgggcgttcgggttcgggatcggtttttttttttttcgttgagtcgcggtcgagttggttttttgtattttatttagcgtcgtcgggacgcgattatatcgagatggtatcgagttttttttaaaggtttcggtttgttgaaagtggggcggcg

SEQ ID NO: 11255 - DNA, 959 bp, Artificial Sequence
  Description of Artificial Sequence: Synthetic polynucleotide
tcgcgggatcggggggatggtcgatttttagatacgggagggattgagcgatgtttaaggagagtaggagaatattgcgtttggagatttttgagagttaggggcgggtcgttttttaaagggatttcggagtttcgatttttagttttagttttttttgtgatattatttttcggatagagatttaagttttaggttcggtttcgtttagaggttttagggagaagattaggttatcgtttattgttcggcgtcggggaggaaagaggaggagtttttgtgtgtttatatttttggtcgtttagggtagttcggttcggtttcgtaattttagtttattggttcgggagattttaaaggttttatcgttagcgtttttagcgtttattgtgtgcgttttattttagttttgtttgcgcgtcgttttcgttattttcgttttagtttttgggtcggaagtttttttttttttttcgtcgtagtttttttttagttttttttttttcgtcgatgcgggaaatttttttcgtttcgtttcgttttttttttttagttgtattttcgttcggttttttcgtttagtttttaatttaggtttcgtttttttttatttatttttcgttttgggtcgggttttcggttttatcgtttttttttcggtttcgtttcggttttcggaagttttatttcgttttcggtttcgttttttcgaagttttttgggttttcggtagtcggcgggatagaacgcggagagtcgtcgtttggtcgggcgtagacgcggtggtagagttcgcgcggcgttggaagcgagtggcggagcggcgggatttcggcggattcgttatggaggaggaggtgagggcggggttcggcggggcgttgggttggggttttcgagttttttacggggattgcggttttgggtttaggttttcgtttttgttcgttttattttcg

SEQ ID NO: 11256 - DNA, 826 bp, Artificial Sequence
  Description of Artificial Sequence: Synthetic polynucleotide
tcggtcgttagttttgggagtttcggttgggcgacgaagttgcgggttggggtatcggttgtttttacgggtcggttttgatttaggggttcggttcggagttgttttttcggcggcggggttgatttaattttttttgttcgaggagttgtcgcgcgtagttagcgtttcgaattcgcgcgcggttcggcgttttttcggggtttatttttcgggttagtcgtcgcgtttatttgtgttcgcggttcggttttttttcgttcgcgttgttttagtcggggttgaggtatcgggtcgggttttcggcgtttcgagttttcgttttttttttttcgttttttaattcgtttacgttttcggttttttggatggcgacgcggatttgtatcgtcgttttgggttcgggtcgagttttttcgtcggattgggttatggttcgcgggattgcggcgtcgtcggggtttttacgtcgtaaggtttagttagtcggtcggtagcgattgcgacgagggggcgggggcggtgcgagcgcgtttgtcgttcggtttaggggagggataggggtcgcggcgtttcgtttcgcgtcgtcgtcgtcgtcgtcgtcgtcgttattatttcgatcgttagtggagcgttcgcgtaggcggggtttcggaggtggagggcggtttttcggagttttttcgacggaggttcgtttcggaaggattttcgcgattttcgattatttttttcgttttttcgtcgttgtggggttttagttcgagaggaggtgttagggttttttttttttgcgtttttttttacggcgtcgtagggatgggcg

SEQ ID NO: 11257 - DNA, 2156 bp, Artificial Sequence
  Description of Artificial Sequence: Synthetic polynucleotide
tcggtcgatttgatttttttttgttcgcgttttacggttttttggttgtcgaatatttttagggagaatttgttgatttcgggttggagtatggtttcgaattggcgttgtatgaagtcggtttggtttaggcgtatttcggttttcgggaggatttggtcgtcggtagtcgcgtttttttttattttgatagcggtgtttatcgagggttgttcgtaggaggcggaggtcggttgcggtggttgttggggcggcggcggcgaggttgcgggttgcgtcgaggcgtcggggcgttcgggttcggtcgttaggtttgggggcgttttgttttcgtcgggggacgcgtcgttttcggcgatgagtcgtcgttttttcgcggagttatgtaggtgttcgtgattgttgtcgtttttcgtgtcgtcgttgtcgtcgtttcggttgtttagcgaggttaggttttcgcggaagcgtttgtagtcgtcgttcgtgttggatttgttcgcgtcgcgggtcggtttttcgttgttcgttgtttcgagggtcgagtttcgggatttcgtgttattcgcggtcgtcgagggggagggcgagggtagtggtcgtagtcggatgtttttgcggttggggttttggcggttttcggttttttttttttcggcgttttttttttcgtttatgatttacgttttggtttttatttgttgcgggaggttgtagagtcgtttgcgtatggacggcggtagtttgtttatggcgttaggggtcggggtcggatcgggtcgggggtaggagcgcggcgtcgcggacgggttttaggttcgttcgtcggttagttcgttcgtggggacgcgttttttgtcgtcggcgtgggggtagttttaggcgtttatgtttgggtaggttgcgcgtcgcggggaggattttagtttcgtttcgagttttcgggttcgtcgcgttatattttttttcgggttcggttgggcgcggggatttcgcgttttttttttgtttttttttttttttttggcgtttaggggcgcggcgcgtcgttcggttttaggcgtttcgttttcgcggggaataatgggcgtcggtcggagaggttttgcggtcgcggcgtttagggaatcgtttcggagtgtagagcgtacggttcgcgcgggtttcgggcgtgcgtttcgcgggagggttggttgttcgtttgtttcgtcgttcgggttttgtggttggttattcgcgagttcgtttcgttttttttgtttcggttcgttcggttcgtttcggggttttcgtcgtaatcgagcggagtttagcgattcgtcgggtttatattagcggtcgtttttttcgaagcgtttttcggtagcgttcgggttttcgcgtttcggaatatttatgaagtcgtcgtagttcgcgggttgttataggagcggttttagtagtcgggtttgtttatttgggttttttaaaggggtagcggcgtacgggtcgggggttggaaaggggcggggggcgggtttggtaaggggtttaggttagattttcgttagattttcggggtcggggtgagaggtatttatattgttgcgtttttaaattttttttttgggttaagttgggagtgcgttttaagtttgaagtttcggttttagttgcgaattttttattttaagattgaagggtggggggtggttttttaatttttttattattaagttttgggttcgtttttttttggtatttttgttttttagttgggttttcgattttttttttgggaggcgatcgggttcgtttggatgtagagtttcggttttttcgtaatttttttggagagggggttttcggaaatgcgtcgcgtcggggaggtttttacggtttttttgtgatatgggtagggtgcgaatttcgcgttagttttttttttgtaaagtttcgtagtagttaggtaaggagggcgtggggaaatagggagatacgtatagggcgcgcgggtgggatttagtttttcgaggtaagatttcgaggaaatgcgtcggtaatagtgacggatgcgagattcgaacgtcgattttcgtacgcgtttttttttcggtagtttcgagaaagggataagtcggttgtagcggggagcggttgggtcggtttttcggacg

SEQ ID NO: 11258 - DNA, 1441 bp, Artificial Sequence
  Description of Artificial Sequence: Synthetic polynucleotide
tcggagggaggaattatcgtaagcggagatttcgggcggcggtcggcggaagggttgggcgggaggcgtcgggatgtcggtaggattttgcgttcgagggggtagggggttcgtgtcggggttttaggcgtagattgatggggtttaagtagggaatgtgagggcggggagggcgtataacggaagggattaatttcgcggtttcgagttgggagtaaatttcgttttttattttttttattcgttttttttttttagtgaagacggtttgggggcgggtggggaggcgcgttttcggagcgttttcgcgtttttttttcgtttttcgcgcgcgatttatcgttttttttttttcgaggttagcgatggttcgggtgcgggcgaggagttgggagggcggttttcgacgtaggtgttagattcgttcggtagtgttcggcgcgttggttcggtttttagttttttcggtcgtcgtttttcgttcgtcgcgtcgcggcgttaggagggcggggtcggggcgcgcgtcgttttttagtaagcgggcgggcggcgttcggtttgagggagcggggcggttttcgtcggcgtcgcgcgcgttgtgtgtgagcggggtcgcgcgcgcgcgcggtaggcgagtgagggaacgaggagcggtcgggtgtgagtgtgtgggagtgagagtgtgtgggagtggggtgagggagaagttgacgggacgcgaggttgtgagaaattgggcgagtgtgcgaggacgttcggttagtttgcgggagtcgtagtcggcggaggagaaaggaggcggttttcggtatttcgattttttttttttttttttttttttttatttttagtcgttcggcggttcgcgttttttcgaaggttttagttcggtttagtcggtcgagagcgagggaggagtttttcgatttaggtgagcggtacgatcgttgttgttttcgggtgtagagtagtgaggcgaaggcgcgttttttcgagtgggcgagtttagcggaatggatttttcgattagcgggggttgggtcggggaggggatcggttcgagcgcgttcggggttcggggttagttgaggtcggtggtcgtcgtttcgcggagtcggtggggagcgaggcggggttcggttttcgcgcgtgtgtcgggaggcgtcggttcgtggcgtgtgcgtgcgatcgggcgagtcgtgtcgagggggcggcgatttcgggcgtgtaaggagtatggttttttcgtcggcgagggggtgtggtaatttcgggaacgtcggttggagtcggattcgcgggttgttgatttgttttcgggattgcggcgatatttttttttttttttttttttataaattttatggagcgatcgcgggaggaggattacgtggtgcggtttcgtagttattgtattcgattttacgtttttttttttacg

SEQ ID NO: 11259 - DNA, 734 bp, Artificial Sequence
  Description of Artificial Sequence: Synthetic polynucleotide
tcgattttgggtatatagcggtaaattttgtttcgtaatatcgtgtgggttttcgcgtattttttcgcgtgagcgtttcgagttcggtgtagtttcggttttcgcgcgtttttgtttttcgtatagcgttttcgtttcgaaggtgttttgataatttcgtaggcgttattcggagtcggggtagggtagttggggttggaggcggcgggcgcgggacggagttttatgaaagttggaagaagtgattataaatcgggattcgattttcgtagttttggcgttcgtttttttacgtaggttcgggatgtcggttttagtttttagatgtcgggaagacggcgtcggttagtttaaggaagagtttttaggaggttggggagtaagggtgtcgggttttttatgtcgggttaggttttttaggagtgtcggtttttagggttattaggtttaggtttgcgcgaggagggagcgcgcgtttttttttatttattcggttttcgtttttaattcgtttttcggtttatatttatttgtttggttgtaagcgtcgtttcgggttaggtagttaggtttttatttttagtgcggcgcgtttcgatgtcgttatcgggattttcgttttttaaattagttttttttttattcgtaatttcgttcgtcggggcgttcgggggcggaggcgcgagtcggtcggcgtcgcggagtcggttcgtagatagggcgggcggggttcg

SEQ ID NO: 11260 - DNA, 935 bp, Artificial Sequence
  Description of Artificial Sequence: Synthetic polynucleotide
gcgtgcgattcgcgtttattgtggtttcgttttattgatgatcgtgaatttgtagggtgttgggttagttttttattttaaggttgggtaggttttcggagtttttttcggtttagatagaagtttttttaggagcgggggaggggaagggggcgcgcggttcggttttaggtgtggtcgcggataatgagattttggggatgggggcgtatttgcgttacggcgtttcgtagagggttttttaggagattttttcgggttttcgtcgcgtcgtgggggtggggtagttttgttggttagagtcgggtacgggtcgggcgggcggcggggatcgtgatcgcggttgcgtgcgttcgcgttcgggcgtttttgtgcggggttttggtacgtcggcgggggcgattcgggtgtcggttcgtgcgggcgatacgcgcgtttttgcggggttgcgcggggttcggagcggttgggggttttttgtcgggcgcggttgggcgcggggggcgttttcggtcgggatgagtttatcgtagtcgcgtcggggttgagcgtcgagcggggcggcggcggggcgggcggcggtttttcggcggtttcgcggcgttcgggtcgcgcgtcgttatgttgggtttggacgcgtgcgagttgggggcgtagttgttggagttgtttcggttggcgttgtgcgttcgaggtgagcgggtcgggtaggggcggggggttcggttggttttagtttcgggcggggagtagtttttttttcgcggtaattttgggggcgcgtatggggatttcgcggcgtcgatttttcggttggggtttggtaggggtgggggattttatttaggttttagttttgtggggaagggattaggtgcggacgggtcggtttgggaagcggcggcgttgggattttttttttttggatatcgtcg

SEQ ID NO: 11261 - DNA, 1054 bp, Artificial Sequence
  Description of Artificial Sequence: Synthetic polynucleotide
gcgcggttttcggaggtcgatattataacgtttgtaagggtcggttggggtcggtatatgattcgattttacggtcgtttttaggggtggaggggtcgttattttaggtttggggaaggaatacgaggttttgaggagcgaatttgttttaggtgttcggggaggtttggcgcggggttgtttcggtttttttttagagtcggggagaggggatatcgtaggatgtcggcgttcgaggcggtagtattaggtttacgggcgttttagtttaaatatttttcgtgtttttagagcggggattttcgttttttagattcggaagcgtcgtttttttcgttagggacgtttgggttttcgtagatttcgtcggtcggcgcgttattcgcgttagtattatggatagcggtcgttttagtcgcgcgtttagggttaggttcgggttggtttttatcgcggacggttgcggggtcggggtagtttcgtaattttaaatttcggtagttttcgtttagtagggaggggtttcgggggcgaagagtgggggagaagtcgggaaggattcggaggaggcggcgggggcggcgttaggggaggaataatttcggcgtagtgtcgatttaggttgaaaacgtttttagttatgggtttgtacgtggagcgtcggggttgggggaggtattcgcggggtttttttttcgtttcgttcgggagtttacgtttgtcggcgtttatagtttcgtttttatttttaggttttagggtcgagatggagaaattaagtcgtattttgagagtttataggagggaggggataggttgaggagcggtcgtttgggtatgggttcggggtttggttttttttatttatattcgtagcgttgttagaaggcgttgttttgtttgtggttagttttcgattcgtgtgtttggtgggagttgtattttcgtataggtagttttattgttttttaatttcgcgtttacgtttttgtcggttttcgttgttttttatattttcggtttgattgatttagttcgaatattttttatttcg

SEQ ID NO: 11262 - DNA, 1474 bp, Artificial Sequence
  Description of Artificial Sequence: Synthetic polynucleotide
tcggacgttgtggtagaggaggttcgcgcgtcgtatatttgttgggatttttagttcgtttaggattggtagggagattttggaagattagcgttcggaggggtgaggtttcgttttgggggtaaggtcgcgaaattacggtttgtagttttacgttaggggtataaagaaaagcgtcgtcgggaatttaatatttgtagacgacgcgtagtcgtagaggaggcggggcgttcgaggtttcgtttcgtatgttaatgaagtatatattatatcgtttcgtttcggcgcgagatcggtttaacgttgcggagatttagaggtcggcggcgttcggaaatattcgcggaggtcgaggtagggcggggtcgggcgtcggggtcgggtcgttgggcgggcggtatagttcgggggaggttaacgggtcggtcgggcgtttcggggacgcgttttttttacggtgcgaagtggtacggttcgtaggggcggggtttaggttatgtgacgcggtcgcggtcgttattttgttttgcggtgttggtatttagagcgtagcggttgacgggtcggatcgttttcgtcgtcgttcgttcgtaaattttcgtgttcggttcgttttcgttttcgttttcgttatcgtttcggtttgtagagtttgttttttttttattcgtagatatgttcgagtttaagagcggtttcgagtatgtttcgtttttcgtcgttatgggcgtttcggtcgttatggtttttagcggtgagcgcggcggcgggagggattcgggggcgggggcgcgcgcgttgtttatgttcgtagttcgtcggggttcggtgtgtgacgttattttgacgtaatttcgagttgtcgggggcgttcgggtttcgtgtgatagcgggcgggggtcggcgtttcgagggttgcggggagtcgtcgggggttcggggcgtagggcgtgcgggtttggtcggggtgtgagtttcgggggttcgggtcggcggttttgttagtcgggtcgtgcggttgcgggggtggggcggcggcgtcgttgttatattagtttcgggagcggcgagagggaggttggggtgggggcgcgaggggggcggcgcgaggggggtcgattttgcgggtaggtgatattatatttcgaaggttttagtgcgcgggcggcggcgcgggttcggtttaggaacgtttagtcggtcgttggagtttttcggttggtggggagtttatgttttttacgggaggtttttagttttcgtttttatggcggtcggtttcgagggttaggtgggttttatttataggtaggtattttcggttggagttggttatagttgtttaatattcgtgtcgttgtgtgggttgtttgggaaagttgggttgagggtttggttcggagagttcgcggagattcgggtgggagtgtgtggaagtggagggagcggggagatagtagtatcggcgttggcg

SEQ ID NO: 11263 - DNA, 357 bp, Artificial Sequence
  Description of Artificial Sequence: Synthetic polynucleotide
tcggagaatttcgtatatatacgtattcgtaaatacgcgggttttttgcgttattaggaagtagtcgttagaatcgtcgggtgttttttaattatttttgggagatttggtttttcgttttcgttcgcgcgcgcggttacggcgtttttttttttttcgggtttttaaggtcggattatcggtttcgttgttatggcgacgtcggtttatttttttttattttcgcgcgtttttacgtttttttttcgtagggagttggggtttttttttttttttttttacgttcgtagggatttataggttgataggagtagggggtcgtttgttgttatcggtcggggatttcggggtttttcg

SEQ ID NO: 11264 - DNA, 814 bp, Artificial Sequence
  Description of Artificial Sequence: Synthetic polynucleotide
tcgtcgggagtttcggggttcggttttagtttcgggttgaataagtagggaggggagaggtatttaggtttcgttttttcgcggttttttttttttagtcggggaggaggagatttaggaagtcgcgttcggtttcggtgggtggagggtttaggtcgcgttttttagtttcgcggttttaggtttcggttcgttcgaggcggagttcgggaggtcggggcggggtttcgggtcggttatttatttgggttgttagttattttagtttcgcgaatagttggtgtcgtcgttgtttagtcgagatttcggggttttgcggtttattatttttttcgatacgatatggttaagcgtcgtcgttcgaatcggtcgtcgtcgatatttcgtttcggttcggggttgaggaggaagtcgagaaggaggaggaggaggcggcggcggagggcgggggaagaggacggtcgtttcgggtttcgtttgagttcgtagggtaggacgagggagcggcgcggtgagagaggcggatgaaggcgaggcgacgttttttttagggtcgtgcgcggtttacgacgttggggtttcggaggacgaggaggacgaggagtaggcggtggcggtagttttttacgtttatacggttattgttttttcgtttttcggtttcgttcgtcgcgtcgtcgttgtcgtacggtaagttgggagcgagaggcggggtcggtttcgtcgggtttggggagagaggcgggttttgtcggcggggcggggtcgatagtaggtagtttcgttttttacggttttaggtttttggacggcg

SEQ ID NO: 11265 - DNA, 847 bp, Artificial Sequence
  Description of Artificial Sequence: Synthetic polynucleotide
acgtaaagcgtttttttttttattttcggagatggtacgtgcgcgtttttacgtagtggcggttgttgcggcgagtacgttttttgcgggatttacgcggggagtgggttggtagtgcgcgtatagcggcggcgagtgggtcgtgtacgcggatgcggggtgggagtgggggcgtacgcgcgggcgtgggcgagcgggtttcggtagtgtatatatacggtaggggcgggcgatagatgtagtgcgtgcgtcggagtttaagcgtataaacggaaagagcgggcgcggtgcgtaggggcgggcgtttagcgggtttggtatgcgcgttttcgttcgaggttataaaagtatcgttatttgttgttattagttaagtcgcgcgtttagttgtttggagaagttcgtttatcgtttttagttgttgtttttttcgatatggattttgagatttgtttttgtttttttggtgagttttcgttttcgttcgtattttgcgtattgcgcgtttttgtatttgtaaagaaatttacgttttgcgttttcgtttaaggatatttgggggaagggtttttgattttttattttttatttcgtgaagggcgggtatgtttgtgtcgcggagaatagggagatttggtattttattttttcgtgataggcgtggggattcgagttcgtttatattaattttttttgtggcgtcgttttttttaggtggtttttgtatttgcgcggatttttgtaagtgcgagggatgtaaatgtattttttgtaagaagagtgagtgcggggattttttttttttgtcgtcgttttttttgttttgcggagtcggtgttttattacg

SEQ ID NO: 11266 - DNA, 589 bp, Artificial Sequence
  Description of Artificial Sequence: Synthetic polynucleotide
acgggggtaggcgtggcgtttttgggattgtcggaaaacgacgtgagggaaaaatttagaggttacgaaaaggcgaatagacggagggtttgttttaggggagttaagtagttcgtttgaagttttttatttggaaatgacgtgtttaattcggcgtttttgtagtttcggtcgtttttttttgtttaatttcgcgtttttttagtttcggtcgtttttttcgtcgtttttttttcgcggtcgtttatttttgagatttttggttttattgagacgtttagttttattcggtaattcgcggatattaagcgttataaatttaaatacgagatttagagacgttgggttttaaacgttttttagagtgaaagatagaggaattaatcgaggttcggttgattttagacgtttaaggcgataggcgttgttaagaaaagggggtgggacgatatttagttgttaagacgacggttttcgggtgggcggtttgaggtggttttcggtcgttaggcgagatttcgcgggaaaattttttgttagagagattaggagatttggggttgcggtcgtttttttcggagtatttacg

SEQ ID NO: 11267 - DNA, 848 bp, Artificial Sequence
  Description of Artificial Sequence: Synthetic polynucleotide
ygyggygtattttttttttygtattatatatatatatatataygatgatatatatttttgtgtttttttygatgtaagtggtttygtttttygttgggttttaggtgtttttgtaggaaatgyggaggygyggggagtttagggaaygggtttggggttttaagttygtgatttttatttttatttygggttttagttttgyggygtyggttygtagyggatttatyggaygatgtygaatatgataagtaygttgtttagtagttttayggygtatayggtygagtagagygyggtgatggygattgttagggygagggaygaggygtttygygygtttggyggtttygaygtattggygttagygttggggtaggygttagggtaggygttygaggygttggygaagagygggggttgtagttyggygtyggyggagggggtyggttttatggttgtyggtyggtttygtygygtttttttttatygtgygttttgggygyggggattygaygygaggggagyggtaaggtagaggtygyggtttygaygtygtyggttgtygygtttyggtygtttygttgtttttgygtttygttygtttgtttygtygttygtatyggtttagttttyggygttygttygtttttttygttyggagygttgtgagttaggagtagtygtaggtttttyggaygygttygtygygygtattaygtggttyggaggyggtygttagtttgygttygygatygggggyggaygttgtattatyggttyggagttgggtaggggaggtttttygttttttttttagggatgtttygtyggttygagtgygatttygt

SEQ ID NO: 11268 - DNA, 1230 bp, Artificial Sequence
  Description of Artificial Sequence: Synthetic polynucleotide
ygyggttygtattttttttgtttygygggygttttgygattttttttattgygttyggtttygatagaagtttagggagtagtggttttygygtttygtaygttagaygtggggttaggyggtaggtttttagtttaggaatyggggagttttttyggaagggtgtgttattyggagttagyggttttttaygtatttttttagagtgagaaygtaygyggygtagttatyggttygttttttttatygggggttttyggatttttaatttgtttggggttgtttttgtttttygggygaggggtttttggggatttaggatatttggttayggggaggyggggtatggggggtagaaagttagatggagygggtaggagaaggggggtgttgggaggagttaaggagggagagagggggygtgtatggggygyggagttaagagttatygagtttgggygyggtgtgtaggygagggttayggttttygtagtagyggggaaygyggggagtygaggtatttagygggtyggggaagaaggtgggggatttygyggaygtygaggagagggtattgyggagttagtaggttttgtagggagtyggagaggggttgagtagattttgaaggygggygggggaygtatttttyggyggggtagggtgttttyggatayggygagygygyggtatagttyggtagggtgatagttttttagygtygygtatagttygttygttgggggtttaggggtggyggttgyggtagggggtttyggggtygggatyggagyggygggygygattttygagtygggagttygggyggyggggttyggggtggtygtygttttttttttttgttgtagttttttgagtyggyggagggttatggtttyggygtyggaygttttttagagayggygttggtttttttyggyggggttggyggyggttgggggatgttagtygggygggtygygggtygtttttttttataggtttygagagyggggyggggttgggggygggyggggagttgtttygggtggtttygtttttagtayggaggatttttttygygaggygtygtygttttggagtttygtttayggygttygayggtyggggaaattgygggagttgggygtttagtgggggaaaaygagtygyggaygygaaggggygggatgaggttttyggggyggggttyggggttyggggttgygt

SEQ ID NO: 11269 - DNA, 1094 bp, Artificial Sequence
  Description of Artificial Sequence: Synthetic polynucleotide
ygygggagtttttygagttttattggttttttttttyggtygtygttaygyggggygtygygtttttaygggtttagaygtttagttaatttttyggttttgtaaaagtttttgggggtgygyggggttgggygggggtgyggygtggttttttttagggtgggttttaaagtttttattttygttyggggygttgatatygtygattygtaagtttatgtygygttyggagygtygyggggttagtaygttygggygggyggttyggaggaggyggyggtayggttggggtattttyggtttygattygygatgaatggggyggttygggtttygtttttygtagtttygttyggaggtttygtttttygagtttttygtttygyggttttygttagtaygttgttygggygttttttaaattgtttayggagtyggatttygygttgttaaygtttygtttygggtaaggttgyggttttygtygggtttyggygttygttgtttygtaygttygggttygggaggaggaggtygggggagtygggtygggygtygygagygttgggagggttyggtttygtyggggagyggttttygagggygtaggagygggagtygggtyggagattttygygtagttyggtgatattttygtttygygttttagttyggggtttttaggtatygygygygtttaggyggygtattygtatttattttygtttygaggttygtttygttygttaygtyggtygtygttaaygagttttyggttygygtygttttagygttttgtagyggaggygtygtttttatttygatygtaggttygttygggtygttygttygtygggtatygagtygttttgtygygygttgygtttyggggyggggtgggaggagagggagtagtygttattttgtttaggtygtygygggttagttttgtagttagttttagttttgggtygggtgttgggaaggtyggaygtyggtyggyggtygyggggtttgtttttyggaggttggggyggtttaggttatagatttygtygttttygtattttttttttagttatttttagygtygt

SEQ ID NO: 11270 - DNA, 1979 bp, Artificial Sequence
  Description of Artificial Sequence: Synthetic polynucleotide
ygtttatttttttygygtgttggagaattaattagtaaggtagggaatgyggttygtgggygtttggtttttttaagyggtttaggtttttagagygygaggtttaggggttttggagtygyggtygygaygygttygagggtygtttttttygayggtagagtaagagttatygygygggagtttygagygatygtttygttgtttyggtatttttttttygtagtygtttagagttttttatgtttygtgaygttygttagggtagygyggtyggaggtygggtyggaygtggttygagatgttygggggtaggtagaagattaygggtaygygataggtaatygtygtttyggttttagaggtggaygttttgtttttttgygttttaatattagattttgtttttagaygatatttttgttgttttyggtatttggaaagattaatygttaggttygagaatgtaagatttatttttttttgygayggaggtagttaatttagttgttygttatttttagtgtygtatgygtttttaygtaggattttgtttaatygttatygggaygtttttttagtttygttttyggatygttagagaggttgttaatttygttttttttttttattttattagygtattaatttayggygttgtgaygtgtatagtttttgyggtyggtyggggygggttaatggyggtggyggatayggygggttaatgggygggagygttttatgyggtyggttttygtygtagtygtygttgggttttggagttagaggtygttttgagayggtgygygatggatygagggttttagtyggggaggygtygtygtygagttygyggttagaygttttattagtagygttygtatygggagtygyggttttygttygagtygtgggygygttygaggggygggttygtttttygtygtttttygtagttttgtygggttygagttygygtygtygtygtygtygttttgtygttygggtygygyggttygggaaaygyggtygygggttgtatgggtagygttygygtttygtygttgagtygtygyggagtygygtagttttyggagtayggtgagaggygtygttggtttgggggyggtggtyggggygggtayggggtattygygyggttttgyggtttgtaggtttttttyggygayggagttgygtygygggttttygggygggtttggggggtyggggtygggtgggygggggtttttgggggttyggggygatygtgagggattaataatgggtttyggagygggtttaygggttygggttyggggtagtygggggtttttgggggttyggggtggtygtgaggggtttatagggggtttyggggggggtttgggaggtyggyggagtttgggtyggtygtaaggggyggaygggggtttygggygggtttgggtggtygggggttygyggyggttttgaggggtygattgggggtttyggggygggtttgggggtygtgggggttyggggyggtygtgagaggyggatagggggtttyggggygggtttygggggttyggagyggtygtgaggggyggayggggggtttyggggygggtttgtaggttttggggatttgaggttgtygggaggggttgttagggggygttggtygggygtygggttttgyggagttggggygtygatttttgattygygagaggggygttttygtygtgttggtygtagttgttatttttagygtttttattattatygttgttttgaaatgagagtaggyggttttygggtttygagtyggagggggagggygaattggggatttgggggygtyggggttgtaggaggygygygtaggtygaggaggggtaggaatgygggtagtygtgtggggggtgttagggggagggtaggygggygggtgtggggggtggttgggaggaaagyggtggyggtggygg

SEQ ID NO: 11271 - DNA, 1930 bp, Artificial Sequence
  Description of Artificial Sequence: Synthetic polynucleotide
ygyggggagatyggggygygyggtaygyggygtttttatttgtggatgtttatttttygtggagggyggtgggttttgtygtaggagattttggygaagaygtyggttaygatgaygaaggygattatttygtaggtgatgtagayggtgaagttggttttgttttttttygggtygtatttgttttygggtttyggygatattattttggtgttgggygtttgtatttatatygggttttggtagttggtgtattggygttggtttagtttttygtggygttttttgtagtagaagyggtagtagtaggtatygtagtagtataggtagtygttttygttgttgttatattygaattttttgtygtattggtygtttaygtygtagtagttttagtaygtttygtaggtgayggtygygttggtygtygtygttatagtygtygygggttgttttygtyggtttttygttttygggatttygggygttygggyggtgtygtttagttygyggtygtttygtgttagggygttttyggtttttyggttttygayggtagygtygtttgtatttagggttyggttggyggygyggtygygggtttygtggaygttgggtagtaggtttagggattttagygagagtagtagtagtagtaggaggygtygtagygttatggyggggtygggygggagggygyggggaggttttygyggtaggtygttttttyggygggtygggttyggaggattygtygygygggtygggttggaggygttgagyggttagyggtttyggggygatggygttatygaggygygggyggtagtggyggyggyggygygyggtgygtayggatyggttyggygygggttgttygggtttttaggttgygygtyggtttygygttttttttgygggttyggygygttttttgggtagttttatttttygtyggyggtgattgyggtttygygygyggttyggtttaggtaggattygaagygyggtttygggyggyggyggyggyggyggyggygtggtttygttygggygggttttgygggataagayggggagtyggttayggggtggggygattggygtttygggagtaggaggagaatygygggtaggygggyggggagggtgygygtagttttygaggagagagattyggagtygggaggggygtagagttygtttttaagayggggtttygyggttttgygygtttggaatygagagygtaygggtygtttttttaggygtagttyggtygttygggttttttagtygttyggtttygtagygygttttygtygtaggttggttttttgggayggagtyggttgaggttggggttyggyggygagtygggagagygygyggyggttggattttatttatttattatgttyggttgygattgtagaggyggyggyggyggyggyggyggyggyggyggggygaggygggaaygtagttgtyggagygagygagyggagagtygtyggttygtygtttgtattagtgtyggaaygtgtgygagagtgagygagggagatataygtatttatatattygtatataygggagygtygygaggggaggggggataggggaggggagggtagtygtttttygttatttaygtttgtaygttygggygtttagggtgyggggygggggggattttttttygtttttttyggatygtagtagttgaagtttygygttaygaaagtttyggatagtagttattygatayggygaattyggygggygaagagggggtygggagtagggyggaaygttygttttgtagtyggttygyggtagggattgattttttttgttattgttttttttagttttygygattagtttttattttatyggagttyggggtagygygttgtttgagygg

SEQ ID NO: 11272 - DNA, 3177 bp, Artificial Sequence
  Description of Artificial Sequence: Synthetic polynucleotide
ygtaggtggggtaagttygggttatygaygagatttgttygygttttygtttttattttggtgtttttttttttttttggtagttttttttttattygtttatttttygggtttatttygatttatttggyggtgggtttttttttttttygattttyggyggtgyggttygttttttttttgatttygygtttggtygtygtgtttygaaggatatgggttatagatygtgyggagatattagtttygygggyggttgttttggtttaagtagaagaaaattatyggggttagygtygggtayggtagttttttygtttyggagttygygttgttygggtttttttttgttgatttyggtttyggtyggttttyggttttygataggtygttgagtygtatgaagtttyggggttgtttygatttttyggygttygttttattttttttttygtttattttttggttagtyggggtttygggygattyggagaggggtaagyggygttttttagaggaggtgtttttaygtaattygggggtttyggygggggtatatttggtgggttttagggygtaagttgagttttygggagggttagtttagtttagttttttttgttygtaggggtatgttgttygyggggygtyggggygtagggaaatttygttyggygygagtttygttttttttgygtttttggggtttttygggttagtyggtyggtttttttttattttgtttyggttttttygtttygygtttaggtttyggttgtyggattyggygttattttyggygaagtygtttygagagggygaaygaaaaggggggtagyggyggagggygggggttyggggaggggygtttttttttttygyggygtagttggagtyggatttaaggggttagtatygtttyggtttygygttaggyggygggggaggggaggagggatttttttaggggtgggtttggagggggtgggggyggttttttttttygtttygtygygggtttattgttygggaggggyggggagatagtggggggtagtttygggygggagtggaggyggagatgtygtygtygtagtygtygyggtggttgtygttgtygtagttgtygtyggygttatagttttttttttyggtygagaygyggagygagygagygaaagyggyggygaggagtttygygtatattatagttggattttttattttaattttaagtttyggtttygtttttagatagtttygtagttaatygtyggaygtygtyggtttygagtygygygtttattggtygttygtygtggtagtgygggygggagygtagggagagaattatagttggaattygatttttattttaaaatttaggatygttttttttttttttttttgtttttgggttygttttygaaggttggagttaattagattgttgtttagatygaatttatttttttattggttattggggtttttgggatttttttggagggagttygaagaattagagtattyggygyggggttttggygtagggtygtaggttttaggtattttttgtttaygatttttgatttgggtagtagtyggaggayggagtttagttttgggygggtttggggaagaaaggagataggyggtaygggggtgagggttgttattagggggttttagagygaaattttaggtttttatttggttaattttttattttggagttgagtttggttgygggattgggggagggaaggagyggagttggatgttttgggggtggggttttaggttggaggggtttagttttggagaaaygggyggagttygagaaaggttagggtaggtatggtttgggygtggtttttataaattttttgggtttattggttatattttygagttaattttgagatttygattttgatttygtaattttaattygttggatttgattttatattgaygtttttgggttttatttttttgtttttagggattttttgaagggygtggattttaygtaggggtttygtgtttgaataygtggttttaggtaggtygygttggatygtagagttyggatttttaggaggggttgyggagtagagygaggatttttaagaaggaatttgtgggggtttygagtgtgtgggagggggyggaagtatagagttgggttttatygattygatttttaaagtttttattatygttattttttaatttygtgttttagttttttttaagtttttatgtggtttagggaaagagtgttygyggaattggaatttygygggtttgtygtttttatttatttattttaattttatyggtagygggttttygtgggtttgtgttttttaygygtgtataygtaygygtagatttyggtttttgtttygtttattttttygagttttggggtttagtyggttttagtttttttttgtygtyggygttattttagaaagttgtgggtattygggagyggagygtygygggtgtgttgggygtyggtggaggggggaatagygaggattagaygtygggaagtatttttttaatatttgygagaggtagatayggyggaatttagtgggttagttagtttttttttyggagattttggggygtttgygttattgyggagaggyggygggatgggtyggatgatttttattattattttttattttgttgaggttattatttttgggygttgtttatttttttaaggttgtattatttaygtagttttygygtatttttygttatygtagagggttggggtygttttagttttygtttyggtygatggggggaggggatgggggaagtggtagagtggttgttgygtygtygtttttttggttgttttttygtygaatttatgtatagagttgtgtaaatgaggtygggygggtttatttgtattttatgttaatgagtagattttttaagtgttttttttttttggygggagtttttgtttttattttgagtatgyggygtttgagttttgaatttygtgtygttttttgggaaaggggggttatttatggttgtttygygygtttgatatttttttttttttygagaggtygtagtttgtygggtyggtttgtttttttygttaggatagaggtttyggggttggygyga

SEQ ID NO: 11273 - DNA, 2195 bp, Artificial Sequence
  Description of Artificial Sequence: Synthetic polynucleotide
yggtagagaggaygttatttaygagagagagtgatygyggatttttatygagaggtaggyggtggaggggttttttttggagatttygattatggagtggttttttttttttttagttygagtygtagygtygggtttttttatttttttagtttttagtyggttygggtttgaaaatttttagygatygagyggagttggygyggygtttttagttygtaggatgtttagttttttygtttttgttttygtttatttttygtygtttygattygattttttygggyggyggagygggaaggtagtagtttttatttgggattygtygtyggtttygttttagygtagygtttggggttaattttagttttaggyggggggygggygggggtgggagggaygyggygyggggygttgggttaggttyggttttggttgggatggyggggttygggtygggaygtagggtttgtttttttttgggatygaggttgagttaggygygttgggttgttygttttygygygggtttgtttttaggtagggttttttgttttyggygagggtgggttggagtttgtattatygttatattatttttatttagggygttaatygggygttygtygygttttaggtaygtgygtttygtttatataggaataaagtttgttyggtttttttygtttygatttatttttaggttgagtygattygtatttttyggttggtgagggagatgggagtttttggttttgtyggygtgtgggttgttgttgttgattgttaygttttygtatgygggygygygtatatttaygygtatttattttttgggttyggttttygtyggggtaattggtgtgagggtgtagttttgygtattttttatygygttttttagagagygygtttayggataygygyggggttattttggygygttttygtgggggatatttagtttttgttattttygttttggttttttygtgagatatattttaggtatagttygttgggagygggtyggagygaggygtatatttaagatagagttygtttttgttaygttttttgygtttttttttttttttagtttgtataygtggatatatygtatatygaggttygttttttgtaygtayggtttttttttgggatttttattagttattaagygtaygtgggatygttattaagygttttttttaygygtgggtygagtttagattattttggatygtgggtaaaggtttttttyggttygattatttygygttygggttttttgtgatygttttaggttttgtttaattyggagygygtttttttttttyggygttttygttttttgtttygatttgttttaattagtttttayggttttgtttttygaggtatagtgtttagygygattttttgggtttttgygtttygggataygttggttttgatttygagttygttttttttaggaggttaggtttttattagttttattttttattttttgtttyggggtggatttgtgggttgttattttttttttttyggttttaggaatttgttgaagttggatygtagaaattgggaagygaatttaggttggtatttatttagttygataaataagagatttttyggtygttttttttyggggttgttggtttygyggggggtggggtgygtagttttgggggttygtagygaggtttagttagttygygttagaggttygtaggggttgaggygtatagaggagggagaggttgttgggtttggttagggttttggagaygyggagggagggtagggygtygagtttyggggtgtyggtttttatgaygtygaattgtttgggggatygttagyggtgygtyggtyggagttagttggtggyggggygggyggttyggagtgtttgtttaattttgagygttygygagggggaggggaggtagttggttaygggttagggggtagtaaggtggaggagygggggttgggaaaggggagggtatttttygggttgtttgtttgygtgtttgtygyggtttaygataatygggagtttaaattttatgaattattyggagttgttggagygataaattttaggttggttttttttttygtatatyggtttttyggatttttggagggaatgtttgtttagyggtyggagttggygg

SEQ ID NO: 11274 - DNA, 2063 bp, Artificial Sequence
  Description of Artificial Sequence: Synthetic polynucleotide
ygtttaaagtagaggyggtaattaggygttygggttaygttatttgataataggatagatgttgtayggttygttttttttataygtattatttygtagttygtagtatygttagaaaatttatttgattttagagtygtagagygtttaggggttttttttygtttattygtagtaygtttygggtttttttttttttttaaataayggtatygggtttttgtattaaaatayggygggttygygtttgttattattagtgtaaaatttgyggggggttgttyggaaaggatygaattttatygttgtatgagttttaaaagggagggggtatatttatttttagttttttattttattttygtttgattgtgatgtatatygggygtttgtatagtttygttttatattagtatataygygtttyggtttyggtygtttttygtygttttttttaaattyggtyggttyggggtttggygtygtaygygggtygttaggggttagygttygtttyggttyggttyggtygaataaagggttygygaatttttyggtaaagttgyggttgyggygaggagygggyggattgtygygtttatttgggtttygttttyggyggyggyggyggtttygyggggtttyggtggygygggtttggyggyggyggyggtaygaataatygttygagggtttygggagtgygygggyggygggggttygtttagygtyggygttayggatttaggtttyggygygggyggyggyggyggttgyggyggyggygygggygagtgggyggyggygygtttyggtaggtttaggttyggtttyggtaaygtygygaygygtttttttttttaygttyggygggatgyggtttyggyggggttygggttttaggyggyggyggyggyggyggtggtagttgyggayggttgggygyggggtygtttygtttttttygttttyggttygggygggtttgyggttattgygayggtgayggyggygggagygyggygggygttgggattgttttgttagggggyggttygggyggygtttaagattgygyggyggyggggtyggyggyggyggttayggttttyggggtygtygygttgaggtgyggagttgttatygyggttattttgttgttttaattgataagaattttttttttttygttttagttagayggggygttygygttttttttttygtttygygttggtttttaataggaagtygtttyggtttttagtaygtgatttttatygtatttgtatatyggagggygaattggttaatyggtattttgtatttgagtttttttttygygygtttttttyggtttattggtttttyggttaggttaygtttttttttttttttttaatattygttygygttgtggttttttgtatygygyggggagygygtyggggtgygagyggtgygygtttygagtggtygggaygygygttagttttgggagtttgtattgttygggggggttaygtggagatttgygtggtgttttttatygtygtygtttgtttttyggtttttgggygttgtggtttygygttagggtgttggygggaggggtgtygattyggttttgygygttyggtgggtttttygggttagygtttygyggygttygggttttatgttgtaattgygttyggyggygttyggygttygtatyggygygygtttygttygtgtygtgtataygttttgtatygttttattttgtataygtataygtataygagtttttggggttttggagtatygtgttygtttygygtttttyggttygtttttgygtttagtygttttttagggagygtttagttgygagtaaaataagtttygttgygaaatagtttttyggggagatagtttttttttyggagtatagatattatatttttatygygtaagttttyggttygggtygaattygggygtttyggygtttaygtattttaygattttttttyggtgtttygtaygtygtygtgattttttattttayggtttttyga

SEQ ID NO: 11275 - DNA, 816 bp, Artificial Sequence
  Description of Artificial Sequence: Synthetic polynucleotide
ygtagtaaagagtttygggygttttgggggagagyggttttaagtttyggaaagtgggtagagtttttttttttagggttgagayggtaggygyggggtttttttyggattygtttygttaaggggatagtgtaggtygtgtygygatttagattygaygttttygygggtttygyggygttygggttgttttygtyggttgggagygttygagtggttttygggaatttatygtgaagtaggagggtygggaataggtatttgagtaggaggyggygyggttaggatatttttagttttgttttggggtttttygtaygtygygtttygatttggtgttygggtaattgggygygygttttgtttttygttttyggtygggtgyggtygggttaggtyggggttttaggyggttgtygygygttttatgttyggygggttaggygyggggttgyggggygygygttttttgggygtygtygggyggttgtgggygtttyggttyggttygygtttyggtttttttgtygttygtttygattttttygygttyggtttygygtttygtttyggtygtygtgtgygtygttttgagttgtagtggtygttatygttatygtagttgtagygtttttttatatttttagygygtygtyggtygggtagtttggtygyggtayggaggaggggttttggagggggyggtygggggaggygaygtygagttatygttttygggtagtygtygtygggggggagygyggagatttgaaagggygygtygggtaaygttttttttttttttatttygggygt

SEQ ID NO: 11276 - DNA, 368 bp, Artificial Sequence
  Description of Artificial Sequence: Synthetic polynucleotide
ygtgtygtttgygttygtgggttatatatattttttttttttttattgttttttgggyggtgtggattagttgtagagtgtgatttgyggttagggagtgttttttyggagttttygtttttagatttttggtgttaaagaygttttgtgagygggtggggtygggygttttagttayggyggtygtygtttttttttttygtaggaygggatagygtttttgtggatygygttttagatgggttatagygaggtggtgygggtgatgttgttgygyggagtygatygygaygttgygyggaaygtgagtgttygagtygygyggttaaagagygaagtttttyggygygtttgtgtggagaaaaygg

SEQ ID NO: 11277 - DNA, 1411 bp, Artificial Sequence
  Description of Artificial Sequence: Synthetic polynucleotide
ygtttttygygtttttttygygygyggtttttggagtttttgaggygygyggttagtttagttygggttygtagtatygggagtagttygtyggttaagygagygygggtyggggtyggggtyggggtttgggggygtygttttygggagtttttttgyggtttttgaggagygagggygayggygaggttgatyggggtygaaattatgaatygaagtttttataagttttagattttgygattttaygattgtagygtagtggaagttaagagtaaggtaagtttttygttygtttyggyggttttgygtttagttttttggttaatgaatggggygtttygyggagggggattggggyggygtggaggygataggygtyggygataattttttagttygggygtygygygtygtttygygggaygygtattggggatttyggtygtttttttygtttttygygyggatataaagttyggtagtygyggygtttagagggtygagggttatyggatagttygggtagattttggattygtttygygggagttgtttttttgttttaygagtgagaggygatyggggygygttatatattggaggggagggyggttttttyggggygagttgagggttaggggttgttyggattyggggtygtgggggggttttgggggttygggtygtgggatggttttggttaaggygtttttaaggttgtaaaggaggtttgttatttgttaggaggagatttgtygtyggtttygagttyggygttttttattygttyggtattaaatatttaggtattaggygygttttttygygtagatttagagtaygtattyggttttttttyggtttagatttagattaygttttttygggygygttttygggttagatattttattttatttttaygggygygtttttattttagatttttttattttyggaygygttttygttttagatttagtttattttttygggygygttttyggtttagatttagatttttttygagygygttttyggattagattygtatttagattatttttaygggygtgttyggtttttttygttgtttgygttygggyggagygtgttygaatttgygggtygygatgygygtttgggtaattggttggtaggatttggygtttttgttttttgygggggtggttttttygtygtagatgttattgtttgtgagggtttttttggtggatttygygggttgaggaggtgttgtagttgttyggggttttgygggagggggtttttygagtttttygttggttattttttgggagttgagyggttttttygtttttttttttttygtatttyggtttttagagttgtgggaaaggtttttaayggyggagtgggagttygt

SEQ ID NO: 11278 - DNA, 1487 bp, Artificial Sequence
  Description of Artificial Sequence: Synthetic polynucleotide
ygggttttgygattygyggyggaggygtatagtaggygtttaaaygatygtgggtttagggtttygygttagygttttyggggttttttggagagaggtagggtttygtygtttyggttttygtaggaattagttggagaaaggygggyggtttggggttgaattttttttattttttatttttttygtygtttggagtagataygtygtygtygygtttttgggaayggttagggaagtaagtagaagtygggaagtygygaaagaggygagaaagtgygattttttttttagattttyggtttttygtygaaatttttgtyggtyggttaaattttagataatggaagttttaygtttttatttttatttttttttataagttyggtygygggtttttttyggttygggatttyggygttagtttyggagtyggagtttgtaygataygttttttttygtygttttatttttttattyggagatygtttatttttttygttttatttttttatttttygtttggtyggtttygttygattyggaggyggygtttttttttttgttttaggtttaggaaggaggayggyggaggaagtagggggttttggttgygggygtagggatgtgggtyggygatyggygttygagggygtaaaaaggyggttygaggattgygygygggygggtagygygggaagtygggaagaaaggagggygygygggggaggaggttgygggtgyggggttygaggtyggggygtttattttttygygtygttygygttygtygtttagttttygttgtaggttttgygygyggtttttygtttygttygtttgttgttgtagggtttggattttgygttttatygtttttagggagttgaggtyggttatggygyggaggygtagaggygtaygggtagyggyggaygttyggttgggttyggtttyggygagagttgtatagtygygtttyggttttttaagtttttgtttgygygggggtygttttygttttttttygtttttygggtyggttgtygtyggggygatgaggttattyggtyggatygtygaygttagtatygttgggggagggtttgaygtyggtatygttggttatagttgttggaaagtgttttttttygggatttatttggagaaagygttgggaggygtygttttttttttttttttttttttttttttttgyggtttttttygttttttyggtttyggggtttyggtttggtttygtygygggttttygtatttttgtataygtaygtyggaggttttttttttygtgagttttagttttttttgygygttttttaggttttyggaatatttatttagttygttttttgttttttttagttttttttggaggtgygttagttttttttttatttggggaygatagagygaggaaygggttagtttggggggggggttaygttttygaggtgtaggggygg

SEQ ID NO: 11279 - DNA, 602 bp, Artificial Sequence
  Description of Artificial Sequence: Synthetic polynucleotide
ygygtatygttgttgtattttttttaaygtattygtaattttttttaaygtattygtattttttttaaygtatttatattttttttaaggtattygtattttttttaagttattygtattatttttttttttattttatgygaagattgtagtttygtagttttgygattagyggtyggaagtagttaagatgttattgtttttagtatgtttygygaggygygtatagtataggtttttttttaaggttattatttttattttygttgtatgttgggattgtagttyggtygttttgtgattaayggttggaatygtttaagatattattttagttagtatggtyggtaggagygtatygygttgtttttttttagggattygtatygttttataattttgttttgtgttgagattgtagttttgtaggygtataattaataagttgggtgtagataagagattatagtttttygtattttaagtaaaggttttttttttayggagtttttttaygygtttattgyggtttygtygtgttaaggggagtttggttgtttaygggttttatttgttagygagaagatagtttggtygggygg

SEQ ID NO: 11280 - DNA, 628 bp, Artificial Sequence
  Description of Artificial Sequence: Synthetic polynucleotide
ygttttatygagaatagaaagtgygttttaggtattattyggatttygttaaattatattatttagaaggtagtgttataagggayggaagtygattttaagttatagayggaaggygtagaggggygttttygtagyggygtgggygggattttyggygtttagttttygttygtygttaggttgyggttgttgtggttgttaaygttatattgggtagaaygttagataggggttatttttygagatygagtagagayggatagtgaggaggataggatttatttataygtttttatgttagtygygattttatttttataagygtttgtaaaattttttttggggttttggygatagttttgtgtttttayggygygtagaggyggygtygygaattttgtgtgtattttataygayggyggggattgaggtttttygtagtttagagtyggagttyggggtyggtygagttygtaggatyggttttttygtygatttttayggttttatttagttttttgggtttatggyggygtyggygttggtgagtggagggtttygtagttygygygagttygggttatygttygtatgtatttattygttgtaatayggyggatgtygg

SEQ ID NO: 11281 - DNA, 215 bp, Artificial Sequence
  Description of Artificial Sequence: Synthetic polynucleotide
yggttgygtattgatygtatttgttatgttttattttttttaatygaagttgaaggtyggtttygatgtttgttattttttataattttatygtagtygatagttttataaatattatygttygtttagttttygttttttygggtyggttgttatttygygttttyggtttggttttggtttygtyggttgtattgtayggttygttttttygt

SEQ ID NO: 11282 - DNA, 2638 bp, Artificial Sequence; identical to SEQ ID NO: 6771
  Description of Artificial Sequence: Synthetic polynucleotide

SEQ ID NO: 11283 - DNA, 2172 bp, Artificial Sequence
  Description of Artificial Sequence: Synthetic polynucleotide
ygygtaggttgtgtaygtgtttgtgtgtaygtgtttttyggtgtgtgttttagttttagtgtgttggygygtgttygagtatagatatatygggggtgtttgggtattygtatatggttgygggtggggygtagtggagaggaagtttatatatgygtgtgttgagatatggtygtatttttgtgtttttttagtttagaygtaggggagattagtatygagatattygagttygggagttttttagyggyggtygggyggagtttggttttaygtggggttggagagtaygtaagtttggagtttyggygttygtttttyggttgtygtyggtttttgtagaatygagtggtyggatggtagttygyggggaggttyggttattygttyggttygttyggggyggggagaagaaggagagttggagagagaatyggtygyggyggtyggagaggygagyggagtgtaagagaggygagygtttttgttyggygttygggygygtttttygtttttttygttyggttygtttgttygttggttttttttttttttttttttttttttttttttggttttgtttttttttttgattttyggttggatgattgaggtattttagaygtgggttgaattagagygagygagygagtttaggggttgtagygatttttygataagttatttagaggygattttgtgygygygygttttttagtggttttygttygttttttgattatgttgatatatttataggataggtagtagtatygatgyggygttgygaygttatagttttygatattttttttttataatttagttttattttttagtattygatttgtgaaaattaygtttatgtagtaatataattggttygaaagygttaaagagttaattaagaggttttyggtttttygtagtttatagygtagttygattttttagagtygtygagtagaygttyggtgaattttagaggyggyggagggtggygaggagttttygttttttttygtttttttttttttygatttygttttttttttttttttttttttttttttttttttttttttttttgttttattttttttttttttaaattttttttgttttgygygtttggatatagatttaggaagygaattygtttaygttttaggataaggaagagagagaggtaygggagaagagtttagtaagatttggattgaaatygagatatttttyggaggttyggagtagaggaaggaggaggagggyggygaayggaagttagtttgtaatttaagttttgatagygttggtagaagggggtttaaattagatttttttttttttaaaggagagagatttttttygttttttygttttttgttaaagtygggtttagtatagttgtagaygttattagtgagaaagagggagaggaagatagatagggggygggggaagaagaaaaagaaaggtaaaaagttttttaggagaattttttatatttgtaataaaagatttaggggttggagagagatttttgggaygtagggttggagtgtttatttygagtttagyggtagggttygggygygagtygagattttgttygtttttttygtttttgaaatygaygtttaggagyggttttttaaaaaygtaaggtataaggayggttattygygygattatgtttgttgatttttygttttgttttttttaaaagyggttttttattttttaaaagatatttttttttttttttttgaagtgtattagttgtgatttttgtttttttttttttttttttttttttttgttttgttttttttttttttttgaattatgtgttgttgttaaataataataaaaaaataataaaatatagtagttgyggatttgttttyggttggagtttagygtttygtttggagtggatgagtttttttatgagagattyggttatttttgggataagtatggtttattattygtttttattttatygggygtyggatttygttatgagygyggtgttgggttattagtygtygttttttttygygttgaygttgttttttaayggygyggyggygttttygttgtygggygttttggttaagtygattatggattaattggtgggggyggtygagatyggtatttygt

SEQ ID NO: 11284 - DNA, 2548 bp, Artificial Sequence
  Description of Artificial Sequence: Synthetic polynucleotide
yggagttgtagtagaagygttttygatttygtttaggtttttagtttatttttttttgaaggtyggtagggggygttattatygttggttttttygygyggtttyggttttygtttygggaatygagtgtttgtagttygygattttggggaggtatagggttagggtatygtttyggyggagaaagtggttgtgtygygygggtggggtygggttagggttgggttgggttggagggygyggggtatttgagtgaagtygtagttttygggyggggtgtagaggagattttttgagygttggagyggggagagttagggygggggttaggygtygtagtttyggaygaggttygagtagtttttgygygtttygtagtaggtttagtagygtgtgygttagygagygtagttttgyggatyggataggagtyggagyggyggttagaggttggttaggtttttttttttttgtttttygttygggttygggtgaatagaattgatygtatygtygtyggygttgtaggtattgttggtgygttaggygygtataggygttttgggatttygggtataggygggtatagaaggygtagagtygggyggygtttgtttgtagtttttggggggggttttaggttagaagttttttgtagttgggttygyggttggaggaggttgttgygggygggataggggttagtttattttttgtttggggttttagtttttttatttttttttyggaaggagataggttttttygaggtagaagggagttgggaatgggtatgggtygggtggaaaygggtttgttttayggttgttygttggggtattggggayggggtattggaaagagggygtttatygtttatttgtttttggagttagtttttgaatattgttaygygggtgtagatttygggtttttttggtttttygtagtygtttttttaggaggtgatttygaataggatttttttagggygggggttaggtttagaataggttagggggtttttygagttattttgyggggttaagagagaggaygttgtatttatttgttttttatgaygtttgttttaygtttggtaggtgtgagtttgttatttgtgtttattttagggatgaggatagagaggtttagagaagtygagtgatagatagaygtggaaggaaaagaggtygtagtggttttgggaaggtttagtyggtttttttttattagattgggtttatatttggtaygagttaaygtttttygttaggtattyggygtagagtatggtgttggggygtagttygggttttagggtttttyggtaggtgtyggtgttgagtaggggaataygggttttttttattgttttagttttaggttygtttgtagggaaggggtggaaggtttaggtttggagggtaagagtttygttttgagggttttttttttattattttttttgatttttttttttttgaaagagtaggtagtatttttttaaggtaattyggtttttttatattttattatttyggatttttagttttttttattaygygtyggtttatttaygtttagtattttygaagagggygttttagttygygatggygtaggyggtttyggtagggggtttttggggtttttggggtaggtatayggggygygtygattttttygggtttatyggygtttatagttgtattagggttaggtygttgtggaaggttygygggttaaattgaggagggggaggyggygtagggttaaggaagtaygggtgggggtgyggtgtttagttttgggggtttggggattgtttttttattttggggtggggtaggatgyggtttattggtatttttttygtttgtttttttygggatttttttgttagygttatagtttatagaagtttattyggggygttgygggtygagyggtagttgagaygtaggaaggataggggtatatttygtaggtttttyggagattttgttttttygttygtatgtygggttttttttatttgggggtayggagggygggtyggggaggggtttygttttagagggggygaattygttyggtygtgttatttttttygggttggtattttggyggggygggygyggygttttgagatggggaagttyggggtyggtygtygttagggggtagtagagattatttttttygygygtygttygtyggataattyggtaggtgyggggtttagygtyggggattttagttgggtaaggtttgggggttttatttattttataaagtagtgygttgtygtgagtatttaggaggtygttattaggaygtygtygtatagaggttgttygtygagttgtagttttattagttagggttaggtttygggyggygtygygttgttttttaygatgyggtygtgggttygygttatattggtagtgttyggaygtttttygtygtayggttttagaaaggggtaaggggtgttaygagggatatgttttggttattttygttttygaggtttattygg

SEQ ID NO: 11285 - DNA, 919 bp, Artificial Sequence
  Description of Artificial Sequence: Synthetic polynucleotide
yggtggggtgtgaaygggyggaagtttygtttagtgtttgtttaattatttttagtttgtggaggtygagygaatgygggtgtggggttygggtyggggtatatttaygygttgygttggtatygggattggatgtagatgagtaggygtaggtggtttygggggygyggyggtttttttttyggyggtttttygagygttgygggggagggtgggaygtggttaagygggygggyggyggggtgggygatagagygggygatttttttaygtttygggttttatttaygtgtagygtggyggygagagygtagaagttagttaygggygttttgtattggtygttggttaagtttaggttygggtygyggyggaaggtattttyggygtygggttgygaggggtayggatggttatttyggttttygttyggtyggatttattygttttttygygygtyggtatttattaggtagtagaygttaagttygtgtagygygygtygttttattaaygygtttyggygtaggyggtagaggaaagyggtttttaygygyggygttygyggtttyggggttaggggygyggttagtagtgttagtaygttttttattaygtygtygtygtttttttyggyggtggtygagatyggggygaggttygtagygatyggttyggyggggttataygtatagggttygggtttygygygttttygttgtygtatygtatttggtatagagygagyggtggtygygygttagggattttttattygttygtygygtgggtttagttttgaaygataggtgttagygagattaggggtttgtygggygtaggggtggggygagggygaygttttttyggtttgaagggtttyggagtttttgygttttgattttgtagyggttttygt

SEQ ID NO: 11286 - DNA, 2488 bp, Artificial Sequence
  Description of Artificial Sequence: Synthetic polynucleotide
ygggtygagttygaggttgttyggaggtttagggtttttatttygygatgttagttttgtttttttttgygtttygggtaagggtttgttygtttgggggatygtatttggaattygygtggttttttttttyggyggtgtygtttttayggatagtgygtgttygggtttgggttggagygaygttttygagattattttattattttataattgtggttygygygtygttaggattyggttyggtgtgggttggyggagtataatgatyggyggyggggygggggygggtaygygggyggygggygttgggggtygygtagatgtttgggtygaataggtgagygtttttyggatattygggtgttygtggggggyggggaggagggyggagggggtgtaaattaagtggtgggaaagagataaaggaagagtgaagagygagayggtgyggatggggaagggggaggggygyggaggggtagtyggtgggtagygygtygaggagttygagtttgaatttgattaagtattgggggttttgtygtgggggtggggygggggtayggtygagagtyggttaygtgtttggtttttttagttyggggtttygtttyggtygttygggggagtygaatttygaggttyggtagtttygttttataagtattygygtttttggggattygaaagaygtatgggggtygaaggttgttygaaggggtttygggygtygagagtttttgagggtgtttgagttattttatttgggttaagttttttttttttggtttgatygtagatagttygtygggtgttttttttttttagtttttatyggatttagagatygtagttttygggagygatgggtaggtatagattttagygtttttttttygggtttagtttygtgtaaggatttttttygaagygttttttttttaagagygygttttttatygaagygtayggyggygygtttagygygtttttatttttttttatttggtttagttttttttttttttttttttttttttttygygttttttttttttttttttttttttttttttttttgggtgtttttttttttttttttttttttttttygtgtttattttttttttttattygttttttygttatttttttttgttgttttttttattttttttgtttgygttttttttgygtttttttttttttygttttygtttygtgttyggtttygttttttttttygttttttygtgttyggtgtttttttttttttttttygggtygyggygtygtygtygttgtygtygttgttygtttgggttttttttttggttattttygttttygggtygggtagtgaygygtygyggtggtgttagttttttttttygggtagtygyggyggtagtagtagtagtagtagttggagttgtggggttgttatygtygttygtttygtttattygyggatttygatygtttattttygtttygtttttagtttaggtayggagttyggttyggatttyggygatygggtygttttyggggttygggtygtygtttttttttttyggttgttgtygtyggtygttgagttgyggttaggggggygaggggttgggggyggttttggggaggggggygtagggggagttttttttgtyggggttgagggagggggygygggggagyggttgygttttgggtygagtgggttggggyggggggygggtgagtgtgttygagagtggagggggggygatgaaggttgtattgtgggggtygyggggygtttaagaggtgtgtttggttttgagygtttagggtygyggggygtattttattttyggggtgygygtygygggttttggggggyggtgattgtgygygtagygtygyggtattgtgttayggtygttyggtgtgtagygggttyggtatygygtttyggygagggaggygttttttggyggyggggygggggtygggttygggttgtygyggtygttaygagaagggaagtggattgtgtttggggatgtgaggaygggaagygttgagtgttagggaggggtttttyggygyggygyggggagttgagaygyggtttgtagagttgagtttattttagtaggttygggtttttttygggaggggayggggtgttttttttaggtgtatygtttgatyggaagtygygggygttggyggtttttggygaaggggttttttttaatgaggggatayggyggggygggggtagtyggtygtttygagggygygygtaggggttaagttggatttatattttygtttttttttttttttttttattttgtttttaaggttggatattttggatagggaggaggggggagtgtaattygtatttttattttagtygttygggagtagaagtgattttgtttttattyggagttgygtttgttygagttyggtygtttttatygggttgygt

SEQ ID NO: 11287 - DNA, 513 bp, Artificial Sequence
  Description of Artificial Sequence: Synthetic polynucleotide
yggtygggtttgttayggggttttgtgtagttttttttattttttyggttgttagygtttygtttygtttttttttagtttttaagggaggaggggagagttgtagagaggaggaggggtyggggaggtyggttttataaaggyggttggaataattttgttygttagatttygtygttyggattttttgagttgttygttattttaygtgatygygtygttttttagttttatygttgagtgagttggggygygtttttatttygtttttagtttttygtygagtygygtggtgtattgaagtyggygtggggaggagagtygatgaaggagaaygttaatatgggggttttaggtagaatttttaatgggagagatttaggatttgagggagtygggagattygggagtttayggtttggtyggttattttttttttttttygggygygaggtttatgagatygtaagttattttttaagaatgygygtgtagtygttgtygtggtaaygt

SEQ ID NO: 11288 - DNA, 1766 bp, Artificial Sequence
  Description of Artificial Sequence: Synthetic polynucleotide
ygttttttgtttattygygttaggtyggttttttttyggttttttttgtggygygagggatagyggaaattayggtagatagtatttttttgagtttaattttttttttttyggaggaagtyggttttttttttttatgttattttygggttatttttggataatagttgttatttttatttgagtygaagttaatttttyggggagttttygggygygtataggtagttyggtttgttttgygattgagttgygggtygyggtyggygtyggtttttttaatggtaaatgtgtgtggttggaggygagygygaggttttyggtaaaggtagtygagtgtttgtagatyggggygagttttgtgaaagtagataaaagaaaatatttattaaygtgttattaygaggggagygttyggtyggggttgtygtatttttygyggaatatttggttttttttagtttygagagaggagaagaagaaagyggaaaagaggtagatttaygtygtttttagttaagtggatttgatygatggtttttttgaatttattaygatatttgatttattagygatgttttttggtttgtgtgttaygtatatataygtgtatataaggttttggttygtttttttttttygtttttagtttttgggygaattttatatttgttttaatttttygtygagggygagtaggagygagagtgtgtygagtgagtgtgygtttgtgtgtttyggygagggtgygygttyggygtygggagygyggttagtygagttyggaggtatygggaggtygagagtygtygggattttagttttgygtttattgtttygttyggagttggatttyggggtyggggtyggggtygtgygtyggggataggtagggtygggtygygggtygygygttttttaggtyggaggtaaaagygttagygygyggagggttygaggagggtatygyggttgggtttttygygtttygggttttagtygttygyggttttyggttygaygtttttygtttyggagygygttygttttttttgygtggaggtyggygggtaggygagyggggggyggtagygtygtgttaaggggttggttggggtagygtggtyggtygggttggggygatttaagagyggttygggyggggtgyggagtyggattttggttggggyggygygyggggagggggtygggggyggtggyggyggygttggggggyggggaggaggtaggaggaggagtagtagygttygtygggggatgtagtagyggtagyggyggyggyggyggyggtagyggtagyggyggygyggagttttttgygtttagyggttyggtygggttgyggtagaggyggyggyggygtttygtttygggtgaggttgtyggggtygtgygygttggtgagtggggygtggggggtaggtgggtggttgggggaygyggggttygggygggggttygyggyggtyggagtttttttyggygtgagttyggtygygagygtygtttaggtgagtyggggttggttyggatygttyggttttagttttagygttgtttgyggaggtgggttygggygggygggagggaggtttyggygtyggtygttygtagagggatgatttgtttgatttygttggttggygggygggygaggatttttygtygygtttttgattygyggatayggtatatygagtataggyggtttygggtaggggagygygtttgggtyggttattygt

SEQ ID NO: 11289 - DNA, 6511 bp, Artificial Sequence
  Description of Artificial Sequence: Synthetic polynucleotide
ygtagggtgaataggttyggttaggagtygtagygtygtttatttgtatttygtttatttggtgaggtatgtygtggagttttaggttttyggttaggttygyggtatttagggygtgtgygtggggtagtagtaggtyggagyggyggtaggtatttttgygggygtttatygygttygtttttagttyggagaggtggggtagtaggtyggtygggygttygtggtgygagggtagtttygtttttttttggttttggyggtygggttaggtttgttgttggttgtttgtgggygtyggttggtgtagggggttgatggyggyggygtaygttttttttagatgygagtaggggtyggtygattgggagtaggttagttgttggtagggagggggaaagtagggtggyggttgatattyggygattttagtgtgggagaggggtggygyggggttgtagaggtgttgttyggyggaggagaggtgggggattygyggatttttattgttgttttygtygtggygattttggagggaaaaaaaaaaataggagatttygttagtgygaaatttygttattgygaattggtyggtatygtygggttaygtagagggtttygggggattaatygtatttygttyggyggggtttgtttagggtyggaaggtattygggggtaatgygtttygaggatttygttgtaagtaaagagtgyggggagggaggagagtttggtgaaagatttgggggaaygagtttttaaagttyggyggygaaggtttaggygttgtttttaagttygaggygtttggaggygttaagttygaattttgggttttgggttagaaaagttygtggtyggagttyggggygaaggagttagagttyggggygaaggagtyggaygttyggtgtagagttatttygtggagttygtttatgaygtagggattgttggaggtggtagygyggtaggygyggatagagtgygyggygygggaaatgygtatttttttygttttygggatttttttttttaygttttygggataaagattttygagygggyggygttyggaaagtagggttygttattttgygtygttttgggaagtgaagagggagygygygtatagggyggttttttttgttggtygggtttagtygaggggagtaataagtgggggygttttgtattgttaagggtagtgttttygtaygtyggggygtagagggggtatgaagaattttggaaattgggtagttttgttygygtaygttttttygtttttgggyggttygatttagtttttaaaggatgygtttttatttgtttaggggtttyggggygtygggaatttggaggaatatggygttgtygttttttggyggaagygttygggtttgygggtaggggtagttttttagggttyggaggygtagtgaattttygygagttygtagttygagtttygygttttyggygtttttgagttygtttagygttgtttgygtttttttttttttttygttygtygtttttttttttttttttatttttygaaattttagtttaatttgttygataggttggagtattygygagtttttayggttttatttggtttygggtatttttattattattttttagtttttattttttttgaaagttaaatttyggttgttttygtgttttttygaggaggtagyggggtaggtgataagtyggttttggaggagtgttygttaaggtgtygttagtaggtagttttatttgatttttttggatagagatttygtgygtaaaagttaygtttgagggttgtagayggggtattttttygagaaaaygggaagtagggttgtttgtygtttaggaaagygttyggtaagttgtgtgggtgggatttgttattttttttttaggtttygttttygaggggaggttatttaggaaaaggttttatataggaaaggggtttygtagaaatggattaaggggtgttyggagaagtggatttygttttatygagaggttagggtttttatgttttygttttygatttyggtttagtggtttttgtttttyggattgttttyggyggggyggggttgtatttyggagttttagtttatttygtagtttttttygtatttgatattatyggttattttttataatatggygttyggygttttttaaaatagtygttagttaaatttaggatttttttagtttttaagyggtaaatttaaaatyggggttayggtgattaggygtttgtygtygttttygtygygygygggttttgttgttygggttattggataygtatyggyggttttgygagygtagatgttgtygtygygagtgttaagatygtttygyggayggggaaagtygygttygaatagtgtgttttggygatagtygggggattygagygttttaatgagaaggaaattattataattttttttygggggtyggygyggaggtttaggygtygggyggggyggtttttagttagttttagtttagtttygtttygtattygggtttggygtagygtygagttttaygttgtgagggaygaagygyggagttagtgggyggtgtttygttgatagtygaagatttgygaggtttgggtttttygaygygttttttttttgttatttttatygtaaatatatttgagattggtagagttgggggaagggatttaaatattgaaatttatttttttttygtttaaayggtttttattygtttttttaaaagayggatgttatttggagttaagaaattgygtatttggggagygatttaataatyggggtttttttattttttaaaaatatattttattttatttatattttattgaggtttaaggtttgagttgggattatgtagttggagttttagtgygttagagaygtttagtttttttygtgggtatagygyggtttyggttttygggygggaggagagaggaagggatttttggggagtttgttttaagggtygtagaggtagtagayggttttattygtttaggagttgyggatagyggygtttygtygttgtygttygaagtggtatttttygyggttggttgaggttagggggaattygygygtattggattagtttagyggttyggttttgttttgttttgyggaaygtyggttttgtagttgtttttggygggtyggttatttagaagtttttattygttttgggaaagaagygtygggtaggaataaaattygagygttaygggtaaggtgagggtgaggaggtgtaggaagttgggagagagtttgtagagagttttygattggagaggtagatatttaggttttatatgtttagatagaaaaygaaatttttttttatataaaygttgtttttttttttttttyggtatttgttatttaaatttgaaagtaaagtgtaatattaatttttaaaatttaaattaaygaaattttttggtttagttattatgtagtaattgatttttattgtaaggggaatatygttaattttygagggygtatttgttgggaygttttaattggttttttgggttggatttaaatattttgtggggattagaggataagattatttttatttgatattgaataygattttgtaataattaatgtttattagtayggtgttygtatttgtagtagatatgatttttttatttayggaatggyggtatttattgtttygttgttttttttygggttygtttgaattttagtatttatttagatttaggtgggtttaaaagaaaataataataataggygttttttaagggaaattttttttyggttttagatagtagttaaattttaggtgatttttygatyggaygygggaataaaatttggaagttgaaattattgagatttttyggttaagtatatttgtagggttttgtattaaggagaatagtgtataaaaagatatataggattttgatatttyggttttaaaataggtttttgggggtaaaataagttatygtagaagtagygtttttggtattagyggygggggagggggatatttgttagaagtagaaattagatttaggttygtaggtattttagagtataggtttaggaagatgggttttagattygttagaggtgyggygtttttttygggygtttgggattttttgaygggtgtygttgggttgttygatattttgggttttttagttttyggttttattttttgattyggtttgaggtgtagtttgaataagttgttttgtttgtgttggtaagtttattttttgtaygttggggttyggaatgggtaagaaggtgtttattttttattttaggttttggttttttttttttatagtaatattagttaaagttgttyggaggaatygatatgttttttygtttgggagygtttaygtaggaggygaagggagtygatgggtattgagggttygygtagtatygtgtygtgggtttaaaggatttagaggattyggaatygtttggtaaaggttatttatttttaaggagtttttttggatttyggygttgttttttttttaatgggtaagygttygaattggagygtaattttygygttttttgtayggaaggtagttagaataaattttttgttttttyggtaygggagatttttttttaataygtatattttyggtttttgggtyggtatttaggtaygygygygtttttgtgaggaagttttaatttttttttgattttaatttttttgtttagtagagtygggaatygaaggttttagtatttaagatagtttttttttaaygttttygttttttgtttaygtgaagaygyggattgygtggtygygtttaagatagtyggtatyggtagaaggggatttttttggaatttyggaggtttygtagtygtttggagaagaggatggaaggttgtygggggtttttttttatygttttttagggagtttaaatttatttattttttggaagttttggatttaygtttttatgaaatygtaaattaggtttttgtaatagygggagygttttaatagygygttatttttaaagaggygygaggtggtgtttttggaaatagggttttyggttttaggtttgagttattygttatttttgtttttattttagayggaagaaggyggttaggygggtagagtaagattygggtagatttgygattttttttttygttttagggaggggattttygagtagaagatggaggttttygagygttttygtagatttygygttaygygtyggaygtttgtttygtttttygggataaygtgagygtyggtagggattttagtaagtggtagattygttaggattaagtaaggtggaaaggtyggggtttgyggtaaatttaggaggagggggtatttaygttygttatttttttttygyggtattggtatttattggatygatattggygttaaagggtattttgaagtatttatgtttagtaagggtatgttttggggtattatagatattaagttatagttattttaaaataattataaaaatgattatygtaaataatagattgttttaatagggygygaagyggtygtygtatatagaygtttttggttttagttttattagatttagtttattgttygtttttttgygtttygygttaggtygtatgtttttygtttagaattttttgagttttaatttttttttttaaataatttttttttttaaataggtaaagtgaggygaggagttgaggggtttataggtttttaagttttygaggagggttygggtttaygttagtttyggttygttaaaygagatttygtgggtatagtttttaatttgataattatttgttttattttatagtaggtaaaagtgaatttttagtygtttaattatttgaaagttataaaggtgtttagggttgaaggttatttttttagyggttttattagggagttygttagagatatgtttgattttttttttgttttgtttygggggggattttygttygtyggaggttttataygtttggtygtgggatggtagatttttgttatttttttattaatatttyggagtttattygtaygtattttaatygttyggagygtaggttygaggattaaggyggtagtttygtgttttttgaggtttttttygtttygtgttttgggtygttatatatttttyggttaagttyggygtttttaatttagaatttggtygtttttaggygtggagtaggttattgttgttagaygttgygyggattygtttttttgygttagtattgggygataggtagttygggtagtatttaggagttattttgtayggttttaggygttygttttatttagygttatttttygtttttygtagygagttttttygtagttttttttttttgttagttttyggggtygt

SEQ ID NO: 11290 - DNA, 6511 bp, Artificial Sequence; identical to SEQ ID NO: 11289
  Description of Artificial Sequence: Synthetic polynucleotide

SEQ ID NO: 11291 - DNA, 338 bp, Artificial Sequence
  Description of Artificial Sequence: Synthetic polynucleotide
yggaaatttttaattygygatttyggygggtgtatygtygagtttttygggaagtgtagttttagygygagygggaygttgggaaatgtagttttgygygtttaygttttygatygggtygtgttygtygyggttttgygaggttygaggggtaagggagygtgtagygggggygggattaygaggyggyggggttgggggyggtttttgtgtttgygtyggggatygyggtgatttygttgyggatyggttygyggtgattttagygygaaygagttggttgtyggttggggygagaaaggtttgyggatyggtttgggygtatgygyggaaggygg

SEQ ID NO: 11292 - DNA, 936 bp, Artificial Sequence
  Description of Artificial Sequence: Synthetic polynucleotide
ygtaggygyggggtgttttgagttttttaatttttagagggaaggagtttatygtgggggatyggttaaagttttattttttgttyggtttagggtaaatyggtttttyggtagtttagttygtttagtttttttygagaggatataggggattyggagttygtaggggttagtattatttttygtttygggtttygttttttatttttygtygtttygagaygtttygatttttagttyggaggtgagggtttttttttatgtaygggygtttgatgggggtaggggtggggaygtaygagagttttaggtttyggttyggatygttyggggttttaaygtttttttttygggtttaggaatagygttttygtaggaagtatttgtttyggagggggttttygggatgtatttygtygtgttygygttygatgttygtttttttagggtttygygatttttggggatttttygtttttyggtttagggggtatttatttygtaygtggagttygggtagygtttttagaygtatttagygggatatyggagaggaygtygaygtagtgtaaygtttyggtygaagygtygaataatatgygygygtygyggaggaggtgyggggygtgttygtttaggtagygggtygtttygaygtggtagaagtttaggaagtygtagttygygaaggataagttttagtygygttttgygtygtatatggyggyggyggyggggygggggygygggttaggatttgggtygggatygggaatyggttygggttttgattygtagtagtttygttyggygttygtaagygttttttattttgttttagtgtttyggttagggtatttttagygygaygttagtttygtttttttyggattatgtaaatgagtyggygggaggtttaatgagygggtaggaygt

SEQ ID NO: 11293 - DNA, 2184 bp, Artificial Sequence
  Description of Artificial Sequence: Synthetic polynucleotide
ygttaygayggggattttattaygttgttttttatttaygttattygtttaatttaygyggagggttttgagggttttattaygtagttttgaaggggtagagttggggttatataggtatyggaagtttaygttgtggttttaggagaaggttttggatgtggtttttatgagtgaagggtggatttatagygttgtyggaataaagggaaattataggtaggagggaagygygtttaggattygyggttatyggttttttagattgttttttggggttaggtygygaggagatggaaagygggggtattataggttygtttgaattygygygtttattyggttatatygattttaaatttttgtatgygggtaggatttttggtttttttgygtttattttagttttgttggtygtyggggtatttgagggatggttgyggggggtyggagggtggaaggggygtygggtagtttyggtggggaggggaagaggtttttygtgtattatggattttygtattygggaagggaggygttyggggttggggagggaggaaaaggyggttgtgttyggggagggggtagygagatttygttygggttaygggttgtaggatggagyggaygggaggaaggagttttgaygtygyggattttaygtttgtyggtygttttttttttttttgttttttttttttttttttttttygtagaggtagygyggggattyggtyggggtggggttagggyggtgygtttyggagtttttaatttggattttatttyggaggygtygygatygygttttygtygtttttaggaaggtgttyggatygygtyggygatyggaggattttgygtttygtygttttttattttgtttygtttygygtttgtyggygatttygyggggtyggttttygtttttatttgtagttyggggygyggygtttttgagggaagyggggttttgggatttttyggtttgggygtgggatattttayggttygtaygaattttggtggttygggtttttgtttttttagaatagygtttaggtttyggagaaatttttygaagtygtgggtttagaygttttygggggatttyggtgggaygggtagggygggygtygygggygaggggaygygtattgttttygggygaattagaaatattttatatygggtatttttttaggaatygtttatttatttttattgttttttattaggttttattttattattttttttttaggtatttttttygttgtatygtttttaygygggtatygtttttattygggtatttyggttttgttttgttttggggtggtygtagttygyggggaggaagygyggygaggygtttatatygggaaagtgttttygtgattttgygaggttatatttygggtgygtygttgygggttygtgggttygtgggttgtagtttttygtttttgtygggtggaygagtttygggttygygtggagttgttyggttaaggtyggttygggaggggygyggygtagggygggtaggggyggggttttaggttaaygtttagttttagatttagtttygtygtyggatttatygtgtttttgtttttttatttttgagaaatyggaaygtyggyggtattttttttttygggtyggagtttgygtttttyggattgygygtttttgtttaggyggyggtygggggtgggagygygtagygggttaatttttttaaagggaattgtygggagggygtttagaagggaaagattaggaagygttgggtgttgagttggagtttggtttttttttgggggatyggggagggggttgaaggtggggagaagatygtyggggttgttaggggggtattgagggagygtttagggggagaattttgggtgggygaygtygtaggggagttgtttggtaggggygagggtttyggggaagtggagtttttggtygagagttgtatttgtggtyggggagggaaagggttataagggtagtgygygtygggagggaagtttaggtyggggggaagggattgygyggyggggataggtgygtygggtgttggatagtgagtaggagttygtyggtgtttaggttaygaaggtgttggagtygggggagttggaaygtaagggggttaagggaaygygt

SEQ ID NO: 11294 - DNA, 413 bp, Artificial Sequence
  Description of Artificial Sequence: Synthetic polynucleotide
yggtttgayggyggggtygagtaggggaagtggaaggatggagggagaaagggagagagttttagtygtttyggttgtggtaggaggagttttaagagygtttttygagttygtttygtatttttaggtttagttyggygtaggttttttttttygttttttttattttygttagttgttgaaatttttttatygttttttygygggtaatagtgttygttaggygtygtygygyggtgtttygttttttaygtygttygttyggaaagagttygtagtggttyggggygtygygttttgatygaygtttttggggtttgggagggyggygttgagagttgggagaggygttgagtttttyggtttttaygggaygtygggaaaggagagygagygtaatttttaygtttygg

SEQ ID NO: 11295 - DNA, 403 bp, Artificial Sequence
  Description of Artificial Sequence: Synthetic polynucleotide
yggttygygtygtygtgttttttattyggttatatagygattttaaaagtttagtttttatttygyggagatttygatagttttgggaggttttttttaaaagggaatttggagaaatttgttgttgagtaygattgagttttattttataaaatatttattatttygtygttattttttaagtttaygtttttaaatatgygaattttaaggtttagttygggagtaagttaattttaggattyggtttatyggygygtgttttgaaaagaatgtyggaggttagatttttttttatygtttagaggtttyggtttagygtatatatttggggttygtagggttttygygygtyggaattygatttgygttggattttttttygggygtaggagttaagyga

SEQ ID NO: 11296 - DNA, 675 bp, Artificial Sequence
  Description of Artificial Sequence: Synthetic polynucleotide
ygttttatygtattttagtggagtgtygygaagttgtaattyggttttaaggyggttygtatttttattygtatataaaggtaggtygtagtttygtaygyggggatagggttagtaaggggyggggattttyggggtygtygttttygtagtttygygtgtgggattttggggygggtygttattttgtggtgyggtygtygtttgttaggagatatttagtaatttygtagyggttattttttataagaaattttygttgtaatygttgygttatattatygygttttttagggataggaaagttttttygtgtttggtgaagttttaggggaagtagttattttgtygtygtatayggtaaaattttttattgtygtagtygttyggttgaygtgataagggaggtgtaggttaatayggygatttygygttttttggyggtagtgtyggagtagyggygttgtttttgatttattyggtattyggttttygggatygtttggyggttgtgaatgtagagttggggygaygtggggttygttttttgggattgggtgtgagtttgygtagtgagttatatgggggttatggtttggygtgggggygtggtygggtggggtygttggatttggtgttggaaagttagggaagtagtygtgygtttaagaaygg

SEQ ID NO: 11297 - DNA, 580 bp, Artificial Sequence
  Description of Artificial Sequence: Synthetic polynucleotide
ygaagagttyggttaataaagtaaaygtttygttttyggttttttttttttttgtaggggaaaygaattgaaygtttgaaaygaaggtggygyggtttggataaatttgatttttygatatttttygtttttgygttygttttygttaagyggggaggagygatygttataatggattttttygtaggttttgtgygygttgggaatttagttgtygtygtttygtagagttttttgttttyggagggygtttattttygggtygtttattattygygtagtatyggtagtygttgtttyggtagtttttagtygtttygttygtttgtggttaattggttttagttatttttygaaatgttagtygattttattgggtattggaagatgttggttaaygagaatttygaggagtatttgygygttttyggtaagygttgttygttgygttttgggygtttygtygagtagtttygggtygttttttagagttttttygagaygttgtttgtttgtttttatttyggygagtygyggttyggtgttttyggaygttagaaagggygttttyggttatygt

SEQ ID NO: 11298 - DNA, 858 bp, Artificial Sequence
  Description of Artificial Sequence: Synthetic polynucleotide
ygggaatatygttttttygttagattttyggyggtttttttttttttttttaaatttatttttaaagttaagtgtaggttttttygttttagttagaagygttgygtgagtttttataygtagtygtaggtagttttttaaatagygttygygttgagtaaatagtttagaygtggggtttaggagggygagttgaggygatygtatygggygygtagyggyggygggttagtyggyggttaatagttagggygyggttygtttygtygttttttttyggggagtttataaggttttygtagygtttygggygtttgttgtttygtgtttttatygaygattttatttagttgygttaygygtygtttyggttgtyggtygygygttttgttygtyggttttygttygtaatyggyggtttagggyggattygggtttttgygttttygygagaagygyggygttgyggggtygtgggygtttgagttygygyggttttygagggtygaatatggggggatgtayggtgaagttttagttgttgtttttggygttygttttttatttttggaatttttgtttgggtgyggattyggagaagttttygagtatttttataggtgagtatttygyggttygtygttgtttygygaggttyggtyggygggggggtagtttatttatttattagttttttygyggggttggttaggtgagtagtgggggtttgttttttttttttaggatygtyggggttttttttagaattgyggtygggyggygttggtttttggggaagtgtaggggtattygttttygttgattttttggagttttyggtgaatttagygtgttyga

SEQ ID NO: 11299 - DNA, 5715 bp, Artificial Sequence
  Description of Artificial Sequence: Synthetic polynucleotide
ygttygtatygygtatataggtagtggaygttygtttatttgttygtttgttgggygtagggygtttttggggtggggagggygtttttgtggggggaaaaggggygtttttgtttyggagggggaaaggaygtttttgtggaaggaagggggggtttttgaagyggtgtggtgagaggaygttttygaggaaggaagggggtgtttttgtagyggtggggggagaggaygtttttgyggaaggaaggyggygtttttgygggggttggagagaygttygygyggtttttyggtttagggatygttggttygygggttygtttttttttyggygttatggaaatygtatttttttygtttgtygttttygattttttttttttattattttttaaaygygattttaatttttygataagttgataagtgaatggygtagaggaygtttygtaaagygttygygagygggtgggatataggygtttttttygygtttttttgttttttayggaagggygygygtygttttygatttggagygyggtgttygygaattygyggtygygggttttggaattttttygygtttygyggttgyggggggayggagatgyggtygggagayggggaygggaaaygggggayggggatggggygygtttatttygagygygggagyggtygttttygtttaaaatggggatttygygtttygagagtayggttyggttygtygtttatgtttttattgtaaggtygtagttttygtygtygatttygatttttygtttygtttagtygyggtttygttyggygtttttttttyggtggaagtttaagtttaattaattgagttygaggygggagggaagggttttgygygtygtggttygtttygtttttttttygygttttttttttygttttgggtggtatttttttygtyggtatttataataagtygttgattaatgaggtyggggtygttttatttygttyggtygggtyggggttttygygggagggggaggggayggygggaaaygyggttyggggagaaaggggggyggggygggggygygyggttygttttygygagygtygygtygattggtygagygygtygttygtyggggggygyggygttaatgygaggtagyggggyggggyggtygygttgtgtgtgtttgygtaaygtygagttatatgttgttttgttttttttagtttagttattyggtgygygatgtgttatttattgtgyggyggggatygygaygagttygggtygtygttggtagtagtagtagtaatattagtagtagtagtagtttyggyggyggygyggatttygagygttygggygtatttyggtttttyggagygygaygyggyggtagtagtttyggtgyggtygygygygttttaggttyggtttygyggttyggggatttygattttyggtttagygagygygtttttyggygtygttygagagttygaggaggtagyggtygtaggtagtyggggaggggggyggttatygttygygtygggtatttttaggagttttagagygyggagggygyggygtygtygagyggtgttggttttygygggttttttyggattttttttatygtttgggttygagggaygygtgatygggygggyggtygggygtaagggtgggagggagtygttttygttygygtttttttygtttttygttttaatttttgggygtygggttygggtygygyggtttgaagygttygygatggygagttygtygyggtaygggtygttygggtyggygagyggagayggttttaattttaataataataataataataataattatagygtgygtaagtgyggttatttgygtaagtagaagtatggttataagygttttttygtgttgygyggattyggygygggyggygaygaggygayggygggyggggggtyggygtygtaatygtygyggttygagtattaygagagygagaaaaagtggyggagtaaggtaggygygtygaaaygggtgatygttttygattgttgtttgaatattaataagygygtygaygttaagtataagtatttgatygttttttatattaaggaygagtatttygtygtggtygtygagaaygagtaggagtaggagggttggtatygygygtttatygatttggttagygagggtygygyggtygtyggagaygygtttttygtygtygygttygtygygttttgtagygtttttttgttyggygttttgggyggttttgtyggygtygtyggggtygaggatagttaygggttggtggttttygttayggtygtttatygtgaggtgtggtaggtgaatttgaagtttaagggtttgggttagagtaagaatttgaygggggtgtatygtttgtgtttgtttgygygtattatyggtttygtgaagtttaattgygagtagtygtyggtgaygttgtagtttatgaatattygtygttgyggttattyggatagttttttttttatygaggtgggtygttyggtygttataggtttyggygagttgtggatgtaggyggaygattyggtggtggygtagaatatttaygagattattttggaggttatgaaggygtttaaggagtttttygagtttyggtygygtagtaagagttaatygtyggggtygtyggttaygtattttattagygttttyggygygygtygttattattatttggttaatttgttttttagttagaygggtttggtgygtygttygygtatygatagtttggtygttatttygtyggyggttaagtgtagttygtgtygggtgygtatygttagygagggygayggyggygyggyggygggagyggyggtygygggygttaggtyggtgtyggtggttgggagttttttgagtttygggtyggtgygygygtttttgagtygttygtatattttgagyggyggttgyggyggtygygggagtaaggtggygttgttgtyggtagggggygygttgtaatatagtygttttatgtttatgttygtggygtattygtygttygtygttattagtttyggttttttgtygtttagtagyggttayggttygggtttttattygtygtygttyggttygtattygtttttgtygtattygttgtattayggtttyggttagyggttttttagyggtagygttttygtttygggtttttttagygatttyggttttatgtttttggaygagtayggttttagtttaggygatttgygygttttttgtagttatygaagtaataygttygagtttatygyggagaygttttyggttygagayggyggyggyggyggtgagttttaygggtatatgattatggataggtttttgagttattgtggtygtttttatygtygggtttygggggaygyggtttaggatttggatygagggttgygtaagaggatttattttttgattaygttagttyggtagyggtyggtgttttagtttttttttgtttygttggatgaatatattttgatgygggttattttttygggtagygygggtygtttttgttygttttgtttygygtttttttttaaggtggtttattatttttatttagaggattayggagatatygagatyggtttttataggagttttagtagtaatttgggggtagaygayggttatatgtttatgaygttyggygyggttttygygggtagtgggagyggtagttgtaggagygaygattatatgtttatgagtttygttagygtgttygtttttaagtagattttgtagtttagggtygtygtygtygtygtygtygtygtgttttttgyggggtttgyggggttagtatttatttttgyggygggtaggatattttyggygagygggggyggttataaggttagttygttygtygagagttttttygaggatagtgggtatatgygtatgtggtgyggttttaagttgtttatggagtatgtagatggtaagttgttgtttaayggggattattttaaygtgttttttagygaygyggttattaygggtatttygttygatttttttttygtagttttgtatttyggyggggagtygtttaggggygttttyggttgttgttatagttttttgtttygtttttataaggttttttatatttgtggyggggatagygattagtaygtgtttatgagttttttygtggggygtattttggaggaggagygtttggagttttaggttaygttagggtttagttaggyggttagygttttyggggtyggttttaygtagtttttttattttgtagtgttttygttygtgyggtttagyggyggtygttyggagggttttttgggttagygyggtygggyggtgaggtttaygygtttgtttttggaggggttgtttagtttgtttagtatgtaygagtatttattgttatyggagtttaagagtttyggygagtatattaatatygattttggygagttyggggttygtttgtygtygttygygttttttttgttggygtyggyggtttygtttttttygtttttgttygttagtagttyggtttygtygttgggtttaggtatttygggtattagtagygatagtyggtagyggttttygtttttygattatatgaatttygattttagtttttttaagttttttaagtygggygtttygagyggttatttygtgggttttttggayggttttttgtttttygaggtttttttttygtattygtygttgttttygygttygttygygttttygtygtygtttttgtagtygtygttatygtygtyggtttygggggagttgtatygtttgtttttygtttyggtygttgttatygtttagggttygggygtygttttatygttgttttyggatatyggggataatggtgattatatygagatggtttttggtgtggtygttatttygtygtaatttatygyggttttttygaagttagaagttgttygygtggttagttygaygtygggygtgaagaggttgagttttatggagtaggtgtygggagtygaggtttttttgtaggttagttagttttyggatttttatygyggygttaaggttattygygtagattygtaggggggtygtygtygttatagtttygagatttttttttttattaygayggttattttygtgttttygtttttygtttataattttaagygttataattyggttttygtggaaaatgttttttttaggaaaagtagygagggyggygtgggtgtyggttttggagggggygaygagtygtttatttttttaygatagttgtagtyggygttttttttggtatygtagggtyggtygtggatttygggttagttygggggtttggtyggttgttttgggagyggtggatygtttatgygtagagagatttttgtyggtttttagaatggttttaattatatygttatygaygtgagggaggagttygggttgttattttagtygtagtygtygtygtygtygtttttttagtygggagataagagtttttggggtyggattygaagtttygggggttttattagygttgtgggygtyggtagtatyggyggygggtgyggggggtygggtttygg

SEQ ID NO: 11300 - DNA, 858 bp, Artificial Sequence; identical to SEQ ID NO: 11298
  Description of Artificial Sequence: Synthetic polynucleotide

SEQ ID NO: 11301 - DNA, 247 bp, Artificial Sequence
  Description of Artificial Sequence: Synthetic polynucleotide
ygggtattgtttgtygttagtataaygaagaaatttatatttaygaagattttagattttaygtgattatattatttaattattagygttggtttggaggaattygttgttaygtgatygttygtgtttaatgatygaggtttaygttttttagatygttatagtygttgttatagggtttgagtttgggyggygtttygtttyggtygtayggtgygtyggygttaatttttttygaaggtttygg

SEQ ID NO: 11302 - DNA, 224 bp, Artificial Sequence
  Description of Artificial Sequence: Synthetic polynucleotide
ygtygttaagaaggaggaggagyggtaggaggygttgygttaggyggaggaggagygtaaggttaagtaygttaagatggaggyggagygygaggtygtgygttagggtattygagataaggtgygygtygggtyggtttygtttgygggaaggyggttttgagtttagyggggatttagatttygtttgggtggaaggggttgttyggaagaggggygggygt

SEQ ID NO: 11303 - DNA, 1174 bp, Artificial Sequence
  Description of Artificial Sequence: Synthetic polynucleotide
ygatgtggyggggtttgggaaatgygttygttggagtatatygtagtttygygggttttygagyggygygygygggtygaggatttttagggtttttygygggtttttygagygtygtygtatygtttttgttygygttygggatygtttygtgggtttttttgttagggtygtttgygtygagaggtagtttaggttttgtyggggaygtaygggttttatttttgattttttagtyggagttttttgaggatttgtaagtatataggttggagtygagaggttaaattaggttttaggggatttttttaataaaattttaaattttatttaggttgttygtaggttaagygattgtaaggattttgagtygaagtagyggtgtygggtygattygaggttygttttttatygtttttttttygggtyggttttgtgtagttggggttttggaattyggtttttttygggttgtyggttttggggtttggtgttygttatttttttttttyggaggtygttattgtttttttattttatttttagttttttygtttttttttaygtttttttttygygtttttttttatttgaattttttttttttttyggttggaagaaaagtyggtaatgagaaattagtttagtgttagtyggaggaggggggtagataattttagagatatayggtaatggagagagaatttattttgtgtaaagagggtttygagttattagggaatttttggattgttttaggttgtygtgtgtgatgtttattaygtygtgygaatattatttgttyggtattgtgtttttagttgttaggttatttgttgtaygtagtaatatttgattgtttggttttaygttygtagygttygtttagaygygyggggygggggtygyggaggggygggygggagttttgattaagttatttgygaggggagggggygygggygtagyggyggtygggtaygaggtygggttgatattattatttgttggggygygggaagaayggtagttgttttgygttgtttyggygagggaygtttggaaaaggttgaagttttgggygtttttaagttygttatttayggggttttygttattttagtttgttygtygtyggtygttttttgtgattttttgttttttggttygtygt

SEQ ID NO: 11304 - DNA, 8657 bp, Artificial Sequence
  Description of Artificial Sequence: Synthetic polynucleotide
ygagaygygtygattttttygggaagygygagygygygygtgtttgygtttttgtgyggatttgggtttgtygtgygygtgtgtgtaaaggtgaaayggyggyggagttttaaatattttattttygaattattttttgttgaggaattaaggttgttaggtygttgttgattttgaagagggttttttttaattgygatttttttaaggaattyggttttgtttatttttaaggaatgttttttttttttattttttagaygttgtaggtttttygygttgygtttttttttaggttggagtygtagttggygggaygygtygtttttayggtatgtygggtgagagtygtttaygagyggtttagygtggyggatttyggttttgagtygygyggaygtttggttaygaggggttttygattygggyggggagaggtgygatttggggggagggggyggggygygtaggaaggaggaggagagagaaaagggygaagttagygygagattaggaaggagaggagggtagagayggagtyggygagatgttggagaatttaggattgtgggtattttgagygggagagaaattttaggaagtaygtyggaggyggggtatttgtgggaggaaggtaaattttgtagagygttaaaggatgtygggagggataagttagttatggggagattttttagaaattyggagttgaaaatagggtagttaagtaagtaagagttggttagttgaataygaggtttttagaatgtaaattataaataagaaagaaagaaaygaaagaaaaagaaaagagygygygtagggtttygggtttaggygtttagagtagttygtgygggggttttttyggtttatagtagtygtygtttygygtttttgaagtggygttygygtggttattyggggattttttaggtttygggggtttatttgaaaatttygagaggttttgtatattttgttaggattggagttgyggggattttttagttttttayggatgtttttttgtaygtgttttttaggaaaatatttaggtttyggaagygtttttgagagtttagaaatgtyggttgagygtgaaatttagtttaatttatttatagagtattagatttagaaaygaygtttgaaagagatgtgggttttatgttgatttaaattttgttttatttataataaygtttttgtttttaaagaaaagaaaaattttttagttaaattttttatgttttyggttttttgtttttgtttygttttttttttygataaaygyggggagttttggaaygggagggtyggtgatygygaatayggtagygatgtgatttgatgtattgaaattatttatatttttaatgttattttattaaaggaaatttatataaaagygtttgttttattttaattgttaaaaaagtttgttatattttygaayggtaattgttttttygttagatatygaaagtttataaggaattataatgagaaaggattaggagtygtttaggttttattgaaatgtttygatgtygtttttttttttttttygaattaagtygtygggggaggaggtgggtygygtttatygttgtygggattygggtyggtagataygggttatagygttttttygtygttygygygtaygatttttggtttgygtygttttttttygttttygygatayggaggayggygtygygttyggygagygtttyggtttttttagtyggtygygttttyggggagatttygagttygagttttyggggtyggttgtttttygygttyggtttygtaggaaattttygttygttgaaatttgygtgtttaygtagattygttttaaattttttggttgttgtagggataataaagaaaaatagaaatagtgttaattttttttttattttttagggtatatttaggaaagggggtagggtttattaggaatttgaaattgtttttatygtttgggttattgtgattaggggtygygtttgtaaagtagttattgggttttttttgygtgtttgtttatttttttttttttgttyggayggtaattgaaaagttttagaagttaagtgtygggttttttttagygattttataggtttgagtatttygtttygtttttgagtaaaatattttaggttttttttttygggagtygyggttttgtagttttygtggtttygagayggagtttgggttgagttygttatttttttaggtagtttygtygggatygtygygttaagattttaygttggtagtatgtttttttatgattgattttttttttttttaagaagaagattaagttaattttaatttaagaagaaggaatgtgatttttttttttaatattagagagttttaaagtaaaaygtagtttatatattttaataataatgaygagtgttaagtttttaatgtttttgygtaggtattttaatttgttatagttattattaataaaaayggtatgtagtaagagtygattgtttaatagtgtaaggtagayggtttttattagtaataggtagtagyggtatggaatatatagattttagtggaggagtataattgttaaggggaaaatatatataggaygggaagaggttatttttaaatttttaatattgagttaaagagggggaagggtaggyggygtttttggagatgtattttgggtgaggggatttttttygttattgtaygtgtttggttatatatttaattgatgttagaatygattgtatttagagtagatattttagttttaaattgaggatgtttgtataataattggttgtttttttttttgtttttggtagaggttyggyggggggaggggggtgggttaagggagggggagggaggatgagttttaaatgttaatgaaattatagygggaatygttttttagaaatggaaatattttaggttagtgttttttggtgataaaaattatattygattttttttttatttaaattgatttgatygtaaaggaattttaaaggttgttatttgatttgatagtgtttgtgtttgttatttagygtgtgggttttttatttatttttttttttggaggaatttttttttaggaagygtaaaaatgtygtagattgtygayggtttgtttaattyggttgttttttttttttttttgttttttagttttatagtaattgattaaaaatatttgttttggattgaattaggatgttttatgtggagtygtaataaggttgaaatttttygttgggtygttgtagggggtttagtttgtgggaayggggtgtttgtgggtggagggagaggtggtygtgggtgtgtgtgygtgtgygtgtgttgagatggtttgaagaggatgtgtgtaggatgggggtgtggtttgtaggaagagtggtgggggagtagtgtgggygaaggggtgggtgggataattggtagggggygagtggttyggttygggagtttttggygggaggggtaaygtgtttggatygygtttatygggagtttgtyggtttaggaggagttatttttaagtatagtattgtagtttgtaattggtttttttgtatttggggaaagatagtttgatgtygtgagtgttttttttgygttttggattagattggtaattygggtttygtttttttygygtygttgtagtygtattatagggaggtygtaatatgttttgygttttgagattattaaggttgtttygtaggttgtagggttagtaggggtgtaggagtyggttgtaggtttgagttgaggttygttttaggttattgygtttttttttttttatygtatttattygagayggttttygaggatagaggtatttgttgggtgggtgtttttaataggttagtatagatttgatatttttttatttttttgagygttttttataggtgatttttyggagtgggtagttagaygtttttttyggttattttygagtggaaaagggttggagaagygtgatggggagagggttttaggaagttggggttttaggaattttygttaatygtttygtttttgagtttygtaaggtaatygtttttttattttagtygygygttatttgagttatttgtaatgtttattgtatyggyggygttaatttgagtttttgttygttttygaygtgattgggaggttttaggttttgttagaggyggtttgttaggtaataattatttttttagtgttttgataatataaatttgaaagaggagttaatttagaaaaataaaataaaataaaattttttaggggayggygtttttttagttgaagttttggygttatttttaatagtggaaagtygtaaygtttagggtttygggggttgygttgyggatttgggggtagaaagtttattttagggtttttttggtaattygtaattaaggygtttyggatttaggtttatgttgggyggagtggatygygaggggtaggygattagaygygaggttaygyggggagtttygggttaggaggtagagtaggttygggatygtggaagtgagagtygygygtattgttyggaggaagattygagtygygggygttattattttgatttttttatttttttgygattttyggattggatataggggtygggttttttyggggtgtatagyggggtaggttgtgagttttttaattggattyggtttggtttgatygygggyggtttttgtttagtttgtgagggtggagaagggggtgggggyggggtagtggttggaaggggygggggtygggtaggggygaagayggtggtyggggayggtgggagtyggtyggagtygggtaggggaygtggtttygagtggatgggagtgggaggggtgygygtyggggtaygtagygyggtygggttgggttgtaggttygygagtygygggttggggtyggagttgttagagaggyggttgygttataaaagtttgtyggtttttttygtygttygttttygtygttttygttttttttygtttttttttygtttttttgttttttttttggtygyggttyggaggttgtagygggyggagtaggggaggggygggttttygaatatgtagatgagygygtgatggatagttgygygttttaatgtttttyggaaattygagygttttttttttaattttttattttygattttagatttttttaaatttygatygtyggtttggygygyggttgygtttatyggtttygygttgttgtygtygttatygttatttygtygtygtttyggttygygggtygtttaggttagtattygggtyggtttgttttygtyggtygttygggtgttygtygtygygtygygtttyggtygggygtggatggagggygtygygygttttgttygttgttyggygtgaygygggtttygygtttygygtttattatgttttattygtagggttatttgtattaggygttyggttygttggygttttattygtgttyggtttayggygygtyggttttggyggtttygygtagygaggagttggygygttyggygtygggttyggygtttagtttttattygggttyggyggtttttayggygtaggyggttatyggtttygggagttygttgtagtattyggtygaygtygtygtygtygtygtyggtttttygttttatatggtaatygggygygggygggaygygggatttttgggygtygggatttagayggggtttaggyggagyggggttygggttyggygggygggggtygtygggaatgtggygyggttggygatttaggagtygtyggttyggttggtygtttygtaggttgagtygggtttygggtggggagggtagygyggtaggyggggaygtttttgagttyggtygggattygygygtttttygygygttttttyggttygtyggttgattttttttgagagtttgggaagtgygttttygtyggggtyggggtttggygtygtttgtttttggttttygtatygtagtttggggaggygttyggagygggttgtgtgttygtttgtattggygtggggygygagggttygygttattgyggtttttgagtygayggtygggyggttygtatttattygyggggtttagggyggtgggggttatygagttaggtttaggagtygagtatttagttgyggtttyggagttyggttygaggygtttaggtttyggttttattttgtttagyggattatgtttttaaatatygtgtttgygggygygtgattygttaagggtygtttgagtttttygtggttygagygtagtttttgtttyggygatttgggggyggttygygagtttygaggttattgagttgggttaggttygggtygyggygaagtaygttaygggygattgaggttattayggggttgtygygattgtyggttttyggyggaatttttgggtagygatygagtygttggggttttggygaaggttgtaaatgtttygaatttaaaygttaaaggatgaattaaaatgttaattayggygtatttgaagaattygaaayggtgattggtttttgagttgtaaattggatttgtttagttttagagtagtgaatagtgaattgggggttttggggtgtttttttaattatataagggaggggaagagggagtagggggaggtagtygtattttaagtatttgtagaaatttagatattaaagagttatttgtgggtttgtgtgygygtaygtgtaagggtttgtgtatattgttaygagyggtttyggaatatttaggggaagatgggttattttaggaaagtgaaatagtttagaaattygagaataaaatttyggtattttttgtgattaatagttggtttygaattatattgygttttttttgtttttttgyggygggaagygtagttttagagttagatttayggggggaayggtggtygtgggygggyggaggggtggtattttttggttggttgttygyggggttttygtatattttatttataggtttttgttggttttagggygtattttaygaygygtatattatyggtatgatyggygttattagttattattygtayggtagygyggtttattygtattagtttaaygatttygygtatygtaagaaygttaygygggaygttayggttatttttaaggtttggtttaaygagtatygtaagaatttttattttattaagggygagaagattatgttagttattattattaagatgatttttatttaggtttttatttggttygttaaygygygtyggygttttaagaaggagaataagatgatttgggtttygagaaataaaagygaagatgaggaygaggaygagggygaygttattagaagtaaggaygagagtttygataaggygtaggagggtayggagatttyggtagaggaygaaggtgagygggtagyggtyggygtaaggtttyggggygttttttttttaggyggggygtagagttaaggyggggaggaygttgttygtyggatattttaggttygggtyggagttttagtygtattatattgttttggggtygtygggatttgagygagygatttttygggtttttttyggggaggttaggtttygtttgttaygtggtygggtgggggygaggtgaggggtttygtggggagggtttagtgtygtaggatagggggyggagggggttttaggtgtttgygttgttttttygtgttatttatygtgttygygtttttatagggattagtttgtaygtggattygtttayggattattygtgttyggtygagtyggayggggagaagttttygtgtygygtyggggattttttgtgygaatygggttyggagtgtaaggataagtatgaygatttggaggaygaygaggaygaygaygaggagggygagyggggtttggygtygtttaagttygtgatttygtygtygtttatyggtttggaggygtygttgttgagtttttygttygaggtygygtttygyggtggtygtaagaygttttagggtagtyggaygttttygggygygtygtttttygttagtaagtttaagttgtggtygttggtygagatygttaygtyggattttaagtagtygagtttgggttygggttgygggttatyggggttgttygyggtygtygygtyggttttaatyggggtatygttaggaggttygttttattttgtttygtygttgttgggtygttttttttattataygtygtttttttayggtaattatataaattaygggaatttgaaygyggygttgtagggttagggttttttgyggtataattttgyggtygyggttttyggygaggttttgtatatygygttaaaggyggttagygaygygggtaaggygggygygtattygttygagttttattatyggttttygggyggyggttaygagtttaagaaaggtaggyggttygyggtyggyggygttygggaggggagggagagttagtttyggggaggyggagygttygggagattygagggagggttygg

SEQ ID NO: 11305 - DNA, 1059 bp, Artificial Sequence
  Description of Artificial Sequence: Synthetic polynucleotide
yggatygtttttttttattttatttttygggtttttattgtygyggttttgttttattatttttagttgaggggtagttyggagttttatggttttttttttagagyggtygttttttygggtttttttagagttttygaagagtygygtgaggaaayggggatttgttyggggtagtagatttttagyggtgaagaygtagagtatygggttgaygttagaattgaagaaggttaaggtygtagttttygttygygtygtttggtyggtttygtttagtttygttaaggtttttttyggtggagttagygttgygatygtttgtagaaggttgattgygtggtagggggtttagagtaagtygaaggtaagtaygatggygtttattagtyggtttattygygtttygtgtygttyggagttttagygggygtttygtagtygtgttagygttaygttgtagtagtygagtattagttygaaaggaagtaygaaagyggttagagtttttaggtttaggtgggyggyggygtggatyggygaygggtggtatagttggtataygyggtttttttataggtggyggtagayggyggtygggayggygagtaatagggyggttagttagatygttagtagtaggyggygggttagggtygggttgygtagtygaggygttaggaaggggygggtgattgygaggtagygttgtaggttgagtaggtyggtgagtagtaygttggygtatatgttgagygygtataygtagtatatygttttgtagttygtttggtttagyggttaggtttgtygggttaggaaggttataaagagyggygtgagtagtagtatygygtygtyggttagygttaggtgtagtataagygtggtygttagyggtygttttygtgtaggtygttagttygttaagttttatattaygaagtygttgttaggtagttttagtagygtygttagtagtaggaaggttgtgtttgtggttygygaagttttttagtttagtagtgtttygttttttgggggayggtagtagatyga

SEQ ID NO: 11306 - DNA, 1663 bp, Artificial Sequence
  Description of Artificial Sequence: Synthetic polynucleotide
ygtaayggggygggggtagaygtttttagttttagaatttygtygggtttatygtttagtgtggaygatyggygtttttaygagatttatygagggtatatagtttttattttagttygttttattygatttagaygatygttagygyggttagyggttagygtatagygagttgtttgggtaattgtggtyggattttagggagtaagttggtttygggttttatttagttttattyggtttttatyggtttttttatttaggagttggaggatggtttyggggygttttagggggattgttggttttyggagtttttagttagaygygttttgttgtgtgagtygygtgygygtttaatttggaggtagtygttttygtygttgataggtgttgtttagagggygtygggtgyggtttttggygtagttggaygygtaygtttyggtgygtgtagtttttygagttyggttagagagaagagggagttagggygyggtttgggggaygttagtggattggagtygyggagtttygagggaaaaattttgtaggygtygyggtygggattyggttayggttttagtttattttagtaggtgygggaggaagaggtagygtyggagtttygaggttagagagtttyggyggyggyggtygtttttttttttygagttggtttgaagtygttgggtattttyggtttttgttgttgygttygtygtygtygtygtygttatygttagygtygtggggattygggaggaggtgtagtygaagagggaggagaagtaggaggaggaggaggaggaggaggggagaggaggagtagggggtggaggatggagtttygggttgtygyggygggygagttagagtygtyggyggygtttttttttttttaggttyggttttggaagaatttgtagttgggggtgggtaggagtaagggyggygggggygggygygttgggggtttagagygtygtattgyggatatttygtygtttttttygttattttyggtgggtatagggaatgtatyggttagggggagtggtgtaggtagtaggtggagyggttttaagaagyggaagtaagtgttggatygagttttttttttttygtagtttaatttgtgttgttygtygtyggagtttttggagttyggyggygtyggtagagtygagtaggggtttaygttaygtygtyggattygygagtatttgtttttygtygtaaaggggttygyggyggtttygggagtagygggagggaygttttttggyggaygttttttygatttagttttttttttttttttygttttattttttttgttttttttgttttagtttttttygaggggggatygygttygagatgagggtgtayggygttagggtttyggggygtatttgtgttattagaagagtttttttttgtygggtatygtttgtttggagtagttgttggagtygtygttttttttygtagagtyggygyggagtttygyggagtttygggtttyggagaygggygaggagtayggtagtagttaggtgagtgtyggtggygyggtyggagataaggtgygygggattaygtttttttttttaggygtttattattyggggagyggggggygggggtygggaggygg

SEQ ID NO: 11307 - DNA, 2065 bp, Artificial Sequence
  Description of Artificial Sequence: Synthetic polynucleotide
yggagtaggtygaygagagatttttgagaaggttggtagattatygyggatttttgtttttttaygtggagttatgggygaggygtttaagaatttgttgaaggagttygatttttttaagtttygggttaggttttggagtatgaggtygttagttaggaygtttagaaatgtattggtggtggaattgaggatggtggyggttatttgtayggggygtttggtagtaagattgttatttttattatyggtygtatttggtttygtggtgtttygtaggtttggatygttaagaaggyggygtagygygtaygaggagtygggtygtaggtattggtaggygygaygttygttgtgattaygtaygtgtatttgggtatttagaygtattattagtagtayggtagygttttygtggtygtgtagtgtagttaggtgtagyggygtgtagtygtygtgggagygtgygtttaygtygattggtgygttattgygtygygygatttttattagttgtagygttatttygtygtygtygtttttggyggtttaatgtagggtygtgaagttagatatgaagtygygtttggtygttaagtygyggtygygtagtagtagttygtgtagttggtgggtttagyggttttyggtagttygtaygagttattygtgttyggayggttttaggggtatygyggayggyggyggygyggygggtaatttttyggygttagggtttagtagaygygggtyggygygygataggygttttaggtgyggggagyggttygggtttaggtygaggtttagatyggatttttttatygagagtygttttagtagtagaggggagtttygygggttyggttttttygatagttgtyggygtaggtygggttttttygttyggaggyggagygtggygggggtygggaygtagygtatyggtagtatatagggtttttgttgyggyggttttttygttgtttygggttygggtttygygtttggyggattagagtagggygatgtygttttagaaggggttttaggyggtggggtygygtttgyggagggtttttyggtggtttgggttagtttaagggttggaagyggtgggtyggyggatygtttttygggyggttgagygggttyggaggtyggttttttyggggtgttttgtggttttgttggtagatttaggttttttggyggttttattggtygyggtattyggattaagggyggagttttyggggtagaggygtttygyggtaagatygtygaagtgggtttygayggttgggtygttgttttyggggggtygaagggtgygggttygggtttygggggtyggggttttttttttagtattaygaatttgaygtygtygagtttttttattatygttaygttgttgaygaattgtttgaagyggtttttgygggyggygyggtttygygggtygtyggtatygagtagyggtttgaagyggtttagtagttyggagttgygtattttttygtygtgtttttgtaggaagtttagtatygtygtttggtttatttyggtagtygtagyggyggyggyggyggttagygttatggtggggttttgggtttttggttttyggggygggtgggygtygygtygtygygggaygygygggagyggggtttygggaggygyggtygygtttatttggtgtttttttygyggttagtygggygtgttttygaagttggatttyggtygygttagtgtygttgggtyggggygtttyggggygaagggygtygggggtygyggggagygtttatttttagygtttygtygggtttyggttttyggggtaggtttttgtttttgtattttgtttaatgggygtttgtttttatttttygygtygygttygttttataggtgatagttgttttygygatgtagagggaatyggagtagaaattttygtygtttttygttygttttagaattaaaggygtagygttttagttttggtttyggttgttaggtgggtgtgttttttagggaygtygyggttygt

SEQ ID NO: 11308 - DNA, 3487 bp, Artificial Sequence
  Description of Artificial Sequence: Synthetic polynucleotide
ygygygtttttagttygtttttggaggtagttygygggatygtaggttggaggygygtyggygtgatttygatygtyggagtygggaggaggagtyggaggaggttgyggggggtttyggtttaggygaaggaagggtaagaggttgttygatygggggyggygtygggaggtgggtgggtttaatatttaggtygggggaggggtttaagagatatygggaagggtagtygagttttaggggygggtggggtggtagttgtgtgtagtaggggatagggttgggtttttggaagttagagtgaagtttttttggttgtttygtaggtaattttattttttggtagaatagttgygaatygttaagttgatttttttygttttttggtygagaggagaggatgttttaggatttagggatgggygggaagaaattatggggagttataagtttgtatttaggyggggaggaggygggygggygtygtttygtaggygtaggygagtgggtgggaagaagggagggagagggaggaaggaggtgaggtygggaagatgttattgtygggggyggggyggggtyggggattyggtaaagggattgtagtagygttaggtgggggygggggttgtaatgttatttatttgagagttaggtgtgtgygttttaaayggggttygttataagtyggtatttttttggtattatttatggtgtagggttttaggtagagggttggggattgyggattygtttttgaagygggaygygaatyggtagagttgggagaaggtaaataagggttaygttttttgtygtygtttygygggygygtattygtygtttyggtygtygtyggtatatttttatttttttagygtttttttttagttggattatygygyggtttyggaggtggaggttgttttygattttagtttttatttttggygtygaggtttygtattttttatatttatttggaaagggtgtttttygtttttttaaaaaaattgtttaatttgtgtagagtttttaattttaggagtygagtatgttgttttygygtgtagygttygygtgtatygggtygggagagggggygatagggyggaggyggtggttttyggaaggtgtttgggatyggatyggttgtaygtgagtttagygygaggttatgtgtatyggtttagttyggttyggygttyggaygtgttgygtattaataaaatgaaattyggggagataggagggtagatagttttaggttttyggagttttygttygggtygttygatttttttatygtatttatttttygtygtagtttttaygttyggtyggagttygyggggaagttgtagttttggygygttttygttygttygygttttttygtyggttygggggygttttgtygtagttattaataaagaaggtygttaagtttatttttttaaaagttgttgttgtatgygttttttttagttttttygtattgtattttttaaaataygattgattaatatgygtaattttttttttttgtgttgtgtatttttttttttttygygttggttttttagaataggtagttagtaggagagagagggagygagygagtaagagagagygagggagygaagagygttggtagatttgttgtaaaaaygttaaataaygtygtggagatgygtagggtttattygtygggggttggattttattttgtttygyggtgtttttttgaygggygttgttttyggttaygygtygttgtagggatyggygygggaaggatgttttygaagtygggagtttttggggtyggygygggagggyggggggygygtatttattyggggtygyggygagggaggyggtygggttygyggygttttaggttttaygtttttygtyggggayggtyggttygtaggatttaagtyggtgtygttaggagtgggygtaaagtaattttatggaygttatttattttttttaaaaaatagtttttaattgygatggtygyggtyggtattatttattaattttttgtgtatgtttttgtttttttttaaattaagatttttttgtgatttttttagaaaaaaaaaatgtgttggggtgggggtggggtgggggygggtaggaggagygagggagggggagtagttattttttttttatttattyggattttygttttygatattttygtygtygtttttttaatttttygtttagttgtttggtttyggyggggagtttaggtagygttgygggtttygtgggggaagggtgttttttttygtagttttattattaygtttgttggtattttgggttyggattttttatggattttggggygtttttagttygttttgtttttagggtygggttygagyggyggttgygttygtgtaagttttattaggtttgtttatattttatatatttatatatatatttygtttttttatttttttatttatattttttgtttatatttygttttttaygygttttagattygggyggygtttttygtaattttaaaaaaaaaaaaaagygagtttatatttaaaaaaattttttggygttatattaatgaygtatttaaaatttgttatttttttttgygttaaaaagaygtttttttgtaaataatagtttggaggygatattygyggagggaaygaggtttgtattgagtatttygtttttyggggttttagygttggaagattttygttttaggttttgtttttgaatygttggttttaaaatgygaatygaataaattgygtggygttttgtagtattagaagtgagtagaaagtgttggtaggaggggagtggaggggygaaygygagttttggggagggggygyggttttttttttygtatttattttaaatggaaaattaatatttygggygggggaatttgaaattgtaggygattttaagaaaagaggggyggttygtagagagggtttttattgggttygtygtttttttttttttttygggtgttttttggygtttagygttgtttygtattttyggggggtggagaaggtagtgatgagygggtgggtgggtggttgtatattttggttttagtaggattttgtttyggggygatttttttttttttgttttttttttttattatttygaaaggttaaaaatygaggggtaatttttaaaggttggtatatggygaggaagyggggygtttttttttttatttttygttttttygttttttttttttyggttttatttttygatttgattttgtggtgtataaatagtaygttyggattttygtagtttttggaagaagagtttgygttygttaggygggygggttgtygggttgttagtyggyggtggyggggttttgggtttgttttyggagtygygggttatatttatttaattygttgygttygtygagtttattttttttyga

SEQ ID NO: 11309 - DNA, 847 bp, Artificial Sequence
  Description of Artificial Sequence: Synthetic polynucleotide
yggtygttttagtaaagtttttaatttagtygatatgaygygyggygtagttaatgggaggyggagttggygttttttggtygggggggggtyggaggggtgggtttygygttttyggtgtttgtygtgtttattgaatggagagagygagygtyggttagtttattyggtygtttygtgttttagtygtagtygtygygttttttagtttagttttaagtyggattttttygggygttaygttttattgygttygttttaggtttttaattyggttygygggttagyggggttagggggygtttygtatttgggtatttttagygatgygtagyggggtagygtyggtttygtygatggagttgttgttgttgtygtygtygtygttyggagygtttygtttygttygygtttygtgygtttgagtatygagttygtttttttttygygttaatttygtygttygttttttaggtygttygygtttttygygygttttttygggttttaygygttttgtttygtagaggtagttttttttaggagyggggttttgtatattatggttttygggtgggtaggggtyggygtygtygtgygygttygtttggygttggttttggygttggygagygttttgagtgggtttttagtygtygtttgttttattaagtgtatttgtttygttgttagygtggattgttaygggttgggttttygygyggtttttyggggtatttttygtaaygttgagygtttgtgagtatttttgttttattttaygygggttatttatttgggttttatygagggggttttaggygttagattygtttttttttttygg

SEQ ID NO: 11310 - DNA, 909 bp, Artificial Sequence
  Description of Artificial Sequence: Synthetic polynucleotide
ygggaygggggygagattttgggtttttaggggtattgaggggtygtttatgtygggggatatggttatttgggggyggttttygttaatygyggagtggggaaaaggggggagggatggaggaygaaygttyggyggtgtttaaaggtaygaygyggagtaggaattatagttttggtttttagaaagygygygyggttyggggtagaatttgtygaagttttagttyggggygtaagggatgtgggggttattggaagayggggygygggtygttygtggggaggagattggattygaattyggtttattttattygagyggygaygttagygttgattttaggygtgtttyggttttyggygyggtttyggtttaatygtgtaygttygyggaaggtttygtattygygttagaagtggtttgttyggggttatyggttygtaagttttyggtgttttygaggtttttgtttygtttygygyggttgtagtyggygggaggggttgagaggygggtygygttgggatttaaggygtygttttttygttagttttttttttttttygttatygggtggtyggagattygggggtattgttggggtattttaaagtatagggttagtttgagtgygtaaggttttgaaaagaygggggggyggygataaggagtagggaggggggttggaggaagayggtaaagtgatttyggaagggtttaggygttttaagtttatygaagaygggaggtttttagtggygtttggggggattgtgggaaaagtagtttaagaaggggaatttggagygaggtgggggagaggtyggtatggttttttttaggagygttagygttagatagagyggtgataggtygtatygggagtatttygtttatattgaaygg

SEQ ID NO: 11311 - DNA, 2150 bp, Artificial Sequence
  Description of Artificial Sequence: Synthetic polynucleotide
ygtttttygtggtygggaaggttaggtygagyggggyggttagtygggtygggaggagggggtttttygggtygygyggtygtataaagyggggagatttgttgttgyggyggtatgaggygygttttttttygygagttagyggagygygygygttygttttygtttttygtttttygttttagttttyggagygttattygyggagyggtttaygttagtygtygggygtatygygttttagyggtyggggaggtgygttgttyggttttygtaaagttattgtgaatggggagygggtgaygttagygtygaatgttaataatgtagygattgagagtgtgggygtttyggggagagygtaagtygygyggygyggagtaaatagygtygagtygtygtygttttagtagtagtagtagtagtagtagyggtagtagyggtygtgtaygttygggttgyggtygtatagygttaaygtgagyggtygtygttttygttatttygtttgtttattttygtygtygtttygttttygtttttttttyggttttttttygtttttttttttttttttttttggygtattyggggggttgggaaygagttgttatgtgatgygygtttttttygygagttttyggtgatttaygaattgtttatttygtyggttgtygggagggggttgygagtygggaagaygyggggaagaggaggyggaaaaggaygtaaagtttttyggygaggtgagtttygggtttygggtttygggtttygtygttgggyggggtggyggggtaagtttgyggggggagygggygygyggggygggyggggaggygtggggaaayggygygggaagggagtttyggtygtygggygygtagtygtttttttygygttttgttygtttttatggtattttttaggaaygggaagggggtgggagtygagtyggyggtygygtygygtygaatgtgtgttttttttttyggttgtttayggyggtygaggygtattgtattttgttggygtygaagggtgttttggaatagtagagggaggaggagtagagagtaataagttaggtatggggagggygggttgtaggaggygygygttygygygagtygtagtagttgttagattygyggttttgttttyggttyggygaggttygggtgtttyggtttttagtttgygattttagttttaggtygggyggttttttttttaattttyggygtgygtatttygggttgtttygygaggattttggtygyggygtttttgygtttagttgttagtygtygtygggtggttyggattatygygatyggyggggaattaaagtttaagtttagggtygtaggaagaggygagttgggggtttygyggygtagatttggatygaattttttttagygaaagatygggttgtyggaaagygtttygygtagttaagatttaagggygttaggtttttgagagggaaattttgtatttttttttttatagattttttatgaagttaaggtgtaatatatatatatatatatatatatatatattttatattttagtttttaagttttagaagttttatttaggagattggtttatgaaggggatattgtttttttygttttygygtygaggygtttygtggtttygttgtgtttygtttattyggygggtgttygggagttyggygtygttggagayggyggygggyggygtttaygggttattttaggtgtttaygaggggagagattggagygagtatttyggygatttyggtttggttaagtatttgtaggaattyggatygtgaggggaagygtgtagggtygggagtgagtgtgtgaaggggtggtatatttttggtttttggggtygygggygtatggggtatttttagtattttttygygygtaggygagtttggtaatttgagggaagtttyggygyggtygttgtyggggtggtttgtttgtggttygatgaggygygtttygtagtttgttttttyggttatygtygtygtygtgatttgtggtttttaggaaaygagagggatyggggygttttattygygagayggattygtagtttttyggygggttygygggyggygagaygyggygt

SEQ ID NO: 11312 - DNA, 506 bp, Artificial Sequence
  Description of Artificial Sequence: Synthetic polynucleotide
ygttttaygaygtttatgttagggttttttagattagyggagaaattagtagttttggatygtaagyggyggggttagggaggygataaygggaagtttttgtyggattttggatatttaggatttagtgttgttygggygttttttygtagtagttttagggygaggaggatggggggggttttygtaggggttatattgtyggagttttayggattygggygggayggtgaggtttttatattgagtyggtggtaaagttttygygaggatgaaggaggaatttygtgttttttattttattaggtttygtattttttggttttttttgttttaggaatygtttgttttttgtygygatyggygagttttttygggtttttttgaaatagtttygtttygaggttttggatttggaagtttaggggtatygttygggagyggggtatttattgtgggttttygttagttagtatttaggttyggagttyggggatagygggygt

SEQ ID NO: 11313 - DNA, 1503 bp, Artificial Sequence
  Description of Artificial Sequence: Synthetic polynucleotide
ygygtttttgggtatttagaaataggtttttttygggaattygttttygatygggygtttttataatatttgaagttttttaggaygttttttgagttgggtaaggygagaggatttttttttagagtttagtttygagtaatgttygagttygygaggtggggttgggggygataaggaggyggagyggggatttagttatyggggatttttttttaagttagtttttaaattattyggygttatgtatttatagttygygygtagttygtgygttttggattttatttaagtattaggttygattagggtyggttygaaggttatygtttayggttagggtagaggggyggygggaaaagggtttagtggattttyggtttaggagggtyggttagttgttgggtygygggtatttaaagttgygggggttygggttttygattttaygtttagyggggttttagtattygagggygygygttgygattygtagagtagygggtgtagtaggttggyggggttgggatygygagttttgtttgtaaagtttaggyggggtagaygttagggagggggtygygtttaygygggtagtttyggygttgataggtagygaygtattttttygtaattygtttattagtagtttaaagtgtgtattgggtttttagtgaaatgtttggttttgaaagtttagttaatatygggtttagyggagttattagggtygttttttgtttygtagaattaggttttggtttyggttayggtgggggtttygtattagttygataatttygaggttaygygttygaaggattttttgggataagaagtggagtggggyggttaggaygygggtygtggggatygygagggaggagggggyggtygttyggatttatttygtggggttttygygygygggygtttyggygtgtyggattatgtygtyggtagtttygggayggggaayggaggygtttaggygtygggtygygyggaaygyggagtttygggygttygtatgtttttggttttggttttttggaagggttaggtygtygttgtygtygygttttggggttttygtttttttttattttttgtatyggagygagyggggtttttaggaagaggttggttttggtggttaagggtttttttgttaaaagttattyggtagyggttygyggttyggagttttttggggtatayggaggttygggyggtygygttttyggggtygggtttyggggyggggggtgttggggttaaggygtygtaygggygtttaatttyggggtgtygtttttataggttgtggttggggttggggygygggaggttygyggggtttyggagagggaaatttagagaaaagttttttatttggtttggggtygtaggggaaggaagaygtttttygtttgtgtyggygtygatygygggtyggtaggtggggaggtttagagttggyggggagttygttttattygg

SEQ ID NO: 11314 - DNA, 907 bp, Artificial Sequence
  Description of Artificial Sequence: Synthetic polynucleotide
yggtttaygtgttttttattttggttygtagaggtttgagtgttgtttygggtagtttygggtagggttgggtagggtttagyggattttaygggtygttttttttygtttttttttagttatttgtttgtygttttttttygtttttttttttttgaggtgttgtttyggttttyggggygggggtagtygygggtagtttagttygtagygtttttagaggtgttygagttttttgaaygtttygtaggaaagtagttgtgttgygtggagtttttttttygtttyggttttttygttygtgtttttgtttttttygttttgyggygggaggtggyggtgtgggttttyggggaggygyggygggttggggaggtggggaagggtgtgygygtgttgggggtgggggggaaagatttgtygtttttttttttygtttttttagtttttggttgttatgtagtttttatggtagyggtatttttagatttaatttttattttygtttagagttaattaaggtaaaatagtgaggggaggagggaagagygtggttagggaagggaggggggagaggtaggaaatttaattygaagttgtaagtgtagygtttattttgttaaagtygtagtatagatttygaagtygtagygtygttttttttttttttygttttagttygagygggaagyggtagtagttttttagagttttggtttggtagggaggggayggygttygagtagttatattgtagtttttygggtttttttttyggtyggygtaggtttygygtttaygattttttttgggagtyggatttgttttttttatygtygttattygtyggtttttgygttttttggttttygatatttygtttggtygtttttttgtgtyggttyga

SEQ ID NO: 11315 - DNA, 1925 bp, Artificial Sequence
  Description of Artificial Sequence: Synthetic polynucleotide
ygggtttttygtygttttggggttgagtttggtgtygttgtttatattgaataggaygttttttttygtgagyggyggaatygttattyggtaaagygggtgttygaatagtttggttaggagggaggygttttygtyggggtyggggggygattyggatygaygygggtyggggtttygtagtagyggtyggtgygyggggtygtggggttttagggygtygggatttygttttygtaaggygygttyggtyggttyggtygygggyggtagtttttttagygagtgggaygagaggttggaggaggggtyggagttgaagttttgtaggatgyggagygtgtgtttgttgggttagttygygtygtyggyggyggaggaggyggtygggggtttttyggggyggtttygaatttgggtttagtygggygyggttatttyggyggygggttgygygtaygaatagtygggttttttygagggtygygygtygygtygttttagtttgggtagtaggtttagggygatgtgtagygygtaggttattaggaatattattaggatgagtaygyggaatyggygtattagtattatttttatggtygygygggtyggttygggtttggagygygttttgttygygygtttttttagttgtagttgggtaygagygyggygtygtttygygggttaaggtttatyggtgtygggyggttattagtttyggggttgttttygggttygggtygygtgtagggygttygtygtyggagygttgggttttygygttatttygggttygttttygttyggttttttyggagyggtygygtttttagtyggggagtttaggggttttggttygyggagtygggygygyggggggyggttggggtygtagtagggggaggttyggygttygtagtygtyggygyggggtttatygggygtgtgggtttatttyggtyggggygygaygggtttgggyggtggyggyggtygtaggygtttygatttttagygygtttttttttaggygtygggygggygggyggggaaggggyggttttttygggtygggttttgtttttaygtygygttygggagatyggggttggggggaaggggggggygaagggyggaaggggtgggygyggggagyggtyggyggggtttygggtaggtgtagyggtygtttygagygtagttttygtttggtygagtttttyggygtttygygtttygggygggtagatatygagygtygyggagtygtttttygygttagygtttatagattggyggagtygtygttttaygagttayggttgggttygggtyggttgygttttygtttttttttttttttttttyggtygygtttygygaygtttttgagtttygggttygttaaggagagggttttttttgttygyggtttgtagagggaagyggyggagatygggagggygygttyggttttggttaggttagtagttgyggtygagtggggggtttyggtttggtygttttttgggattttttttygttyggggtygtygtygttagttgtagtttttyggtttttttttagaggagygyggggtyggggtttaggttaagttttttttyggagtygyggggygtttgygtygtyggatgagtttttygtygggyggygatttygtgttttaygttygtttyggtaaggaggaggyggaggyggtttygygagagaggtttaaggagygattgggtttggatttaggggaygttagggtagyggagttttyggtatyggtttygttttttttttttygtttattygygggaygygttygttttaattttttaggygtygggttygttgggggygttgagaggggttggtgtgtygggggygtttttttgtttggggtygaygg

SEQ ID NO: 11316 - DNA, 1287 bp, Artificial Sequence
  Description of Artificial Sequence: Synthetic polynucleotide
ygygtggttygggaggttttyggaggagggaagggtttattttagygaggggtataggyggagaaggtgyggggygaggyggtygygggtttttggtatttttttttttaygtttaggttaagttggyggtgttgttggtgaygttggtggtggtygyggttttttatttgyggatggagtagaagttgyggyggggygtggtttygygttagtttygtatttygyggttttagtataaggtgygyggtgayggttatttggaggaggataattyggaygagagygaygyggagggygagtatggggayggygyggaggaggaggygtygttttyggggtttaggtttggtttygagttygttggattyggtygtyggttttgttygtaygaataggygtaggggggygaygggtyggaggagtagtgaggggtygtttggttttyggatttagtttygtttttygtyggttttagtttattaygttttaggtyggggggatttttttygagtttygygttgttttygaaggtttttgtttttttttttttaygttggggaygttttttttagagttygggttattttygggttttygtagttttttttaaggyggagtggagttttgggaatttttyggttaagtataggggttygaaaatatagttgatatttygygggtttttagtaygygttttagygtyggagtagggttagggtttttttgygattyggtttygttttagatttttttagttttyggtygyggattygggtygygtgtgagygttttttgtattttttatttttagggttygtygagagttaygattttttatagaaaatgagygataaagagattttgtattgttttgattggagagttttaggtygygggggayggagygtttttgggatgtaygttyggttggttyggtttttgggygyggtggtgagaggttttgatttagggggatygyggggtgtggggagtgyggagttttattgggggyggggygaggtgttygtaggtttygtttattagtttttttttttttttgaggtttygtttttttatgtttgtttgtttttgttagttttagttaggagaagggagygggggagyggttggtagagatagaggagggtgtgayggygttgttggttttttatgggtttagagggygagatagatttygaaggtatattttttaggggtttgtgtaggtattttyggttttttagygattattttygygtyggatagggtttattttygagttaygg

SEQ ID NO: 11317 - DNA, 2906 bp, Artificial Sequence; identical to SEQ ID NO: 6859
  Description of Artificial Sequence: Synthetic polynucleotide

SEQ ID NO: 11318 - DNA, 2146 bp, Artificial Sequence
  Description of Artificial Sequence: Synthetic polynucleotide
ygaaagyggttttgagagygttttyggggttttttygaagtgtttaaattattagygtggttagyggtttygattttttattaygttttttttygygggtttaaagggatttgggtttygtaaatttttgtygagggagaygttygtygatttygtyggtttayggggygttttgtttttttyggggyggttttttaggtaggttgagagygaaygggatgagtatatttyggaygtttaagggggygtttagygtttygaagtygtygttttggtttgygtygtygtyggtttygttttttygggtaggttggaagygttaggtgttygygyggtttaygtagtagatggygtygtttagggyggygtagyggaagggttgtaggttygtggggtygtyggggaggygtaggggygygaygtaygggttttattgtttggttaggtagtggtatygggataygttgatttygttyggtttygtygtttgygtttygtygyggttgtygtttagatygaagyggtagatgaagtygtygagagttattatgtyggtygagygttygyggttgttgttgtaygggtatttttgttattygtygygtygygggttatatttgagtaggygatagaagagggagttttyggataygtagatttygtygtggtaggtggtggttttatgygttayggygaaggygtttyggggtagyggygttaygggggtttagyggtyggygygygggtygtagygttttaygttgagtaggtattygtygtttayggygtagaggtgatygtttagggttagtagtygtagttgygagygygtttggygtaggggttttayggygttttagttgttygtggtygggttgtagtagaagatttggtyggaygggygygygyggtygtyggggttygygggygttaygtygttygttaygaagaggtagttgtagaggaygtataggtygtagtttygygtyggygygttttygggtagtygygttagttygygttatttttyggtygtygygtggaagtagtagayggtygygttttygygygygttygygtttttygaggggttttgaggtyggttgttygygygttttttygtyggttygagygtygyggttaagaggtgggygyggtyggygygtaggyggyggygtagtagtaggtttygttttgygttygataggyggtygaatayggygggttygygtagtatttttagatagtggtygtttatgaagtagtaggyggygtygygtagttygtttagtygttgtygtttggtygygtttaggatttygtagtagttggttaggtttagttgyggttttayggygtyggtggygygttgygyggygtygggtagttgtaggyggygygygtyggttattatttyggttaygttgtygggtygtaygttygttatgygttygttgtaggygtyggygaggagtagtygtagygtygttaggtttattttttgtattygtagtaygtttygygaygygygygygyggaagtagtygttgygygtygttagtatygttttgtgygygygtagtyggygtttygatatttttagtattaggttyggtttttygtatatygtttygaatttygggggtaygggygygggtttttygggtttttygggggaygyggggtttttaagttaaaygygyggttygggggayggygtygygggttttttygggtaygygygttttttaggggaygygagttttttyggggaygyggygttygygttgtyggttttttattgtygttttattattygygggttatygttggagggyggggaggtggtygygtttttygtygttgaggygagggattgyggyggggattttttttyggagttgaagtatagggaygygtygagattgtagggtgtttgygtyggggaygyggygttttygttttygtttttttyggtagtttygggtttagtttttgggtagaggaygtagggggttatygygtgttttatggtygggttgtgttgygttgygttygygygttttyggtttygtagtttgtaggtttggttaaggtygagttttatttyggggtttttagttttatagttttttttggtaygyga

SEQ ID NO: 11319 - DNA, 865 bp, Artificial Sequence
  Description of Artificial Sequence: Synthetic polynucleotide
ygggagtttttttttttygtgygtygttgttygggaygagaaattygtggggtatttaggattaggataygaggttttagtttgggtaggtggataagttgtggggttttatttttygtaggygatggttttttaaagtttgtataaatyggtttygtygggtyggttatgttygttttttttttyggygtgggaagtttttttaaaagtggaggggagygagtgtygygttttgttaatttygattgygtttgggtttttttygygtygggtttyggagtygttttttttgattttgygattayggtyggggattttgygygygttygggaatgtagagtttttagygtygygtagggttygtttygatttyggtyggttttgggtaattygtttygyggttagtttttattttaagatgtggttyggtttttattttygygggggggaaatgtygggygatttttatattgatttttttgygtatttagygtaaattaygaatttagagttggagttgttygtagatttygygtagttagatttygygtttttatttygtttygtttygtttygtttggygtattaattttyggtygaggaggggtygygtggygtygyggggggygggtygygtaygtttttygtagggaggatttagggatagttagggtttygggagagttygygygtatygttyggtttygyggygttagttatggygttygtgygtggtttygttagggatggggygaygyggttagagtygtaygygatygaaattygtattttggagtygtagagygygyggttttgttgtttagyggttttttggtaagtgaygtggggaagaaaygtagggygt

SEQ ID NO: 11320 - DNA, 865 bp, Artificial Sequence; identical to SEQ ID NO: 11319
  Description of Artificial Sequence: Synthetic polynucleotide

SEQ ID NO: 11321 - DNA, 1463 bp, Artificial Sequence
  Description of Artificial Sequence: Synthetic polynucleotide
ygtaatttggggttygtagaygygygtggatataaaaatataygttttygagatttatttttttygggttatattgtggggttgygttyggggtaygggttatgtttgaatttttttttatygtygygtttygggttygygtttygtyggtygttygtattgggtttygygtygttttygttattatatygagtygtttagtattttttttttttgaaggttggtttygttyggggtgttttttttttyggttttgtygtygttgtttattttttyggttttttttygtygggtygggtagggttggggygyggggttgggygagggygygttagtttattggagtttttttygggygtyggggttttttygggygggygtygygggttgtggggttggagttggagtyggggtagtggttgtygggttygggttgggttggggttttygyggygagtttgygayggyggyggygggygatttaggaagtgtaagggagagayggggtagggygygggtygggagyggggtatygagataatygggtttygggagggygatttggagagggagggygggagttaggggaggaaggaagaaggaaggaaggaaggaagtaaaggatggggygaggaygygygttttaggagtaagygyggagagttggggttgggggttgtagtygttggaaggaggggaygggggtgtttagagaggaggaggaggaggaagaggaggaggaggagyggggyggaggagygygggtygyggttgggaygttgggattygagagtygttgagtaygygttttaggtaggttttgggaagttygggatggaagtagttttttttttttygtttttttttttttttttttttttttttttttttygygtttttttttttttttttgttttttttggaygtgggttgtyggttgtagttyggagggayggggygygggayggagtttttygygggaggaggggtyggyggtyggatggygygygtyggggaggggtagygggtygygggyggaagyggygattttagttttygatttagyggttggtyggagggygagggttygggaggtygagggtagggaggtygggtttygtygtttttttggttttygggggtttyggygtttgygygtttygggatttyggggattttgtttygtyggggtttggatygggatttgggatgtgtgygatttttagtttgtyggtttttatygagggatttgtatttttggttttaagtttatttttttygagttagattyggttttttttttgttgtttgaatgatagtatgagaattygagggatatyggggatagtttatttygggtyggtttttttaggatagggttttaaatttatttttagygygggttttgygaygygttyggagtttttttygtttygttttttgagygtttygyggtttttyga

SEQ ID NO: 11322 - DNA, 1437 bp, Artificial Sequence
  Description of Artificial Sequence: Synthetic polynucleotide
yggtttttyggagttgaggtttgygygattggatttaggggtagaatgagtgygtygggaattttaaaattttagattaagatataaggggagtygayggttyggaaatttygttgygggtgttttaagygygaggtygttygggtagggtygtttagggatyggggygttgggtgyggggtayggggttttatttttygygggttggggygygtagygygyggtttttttaagaaagttygtygggygagtttattaaagtttaaaaattygtygtggagaagggygygggggaagaggagagagggagagygttgatttaggygagagagaggggaaaggttyggtyggaggtyggygtttygyggtyggggtyggggygagtttayggtgggyggtggggattggttgygygttttttyggagatygygyggygggygggggagggggttggtygggttttagttgaggtyggtttyggtttygtttttygtygtyggygttygttttttttttyggygttygtttttygtygtygttgtygtygtygtygtygtygtggygtattygtyggtygtagtgaaaaggyggaggyggyggttttttyggtttttattgtttttttygtygtattttttttttatttttygtattygttaaatttgatgtgattttggttygaygyggaggttgttttttttattgtttygtgggtttttygttattygtttygtattygygagygtatygtttttygygtttttttttatttttygyggggtyggygtygygttygttttygygttttttttygtygttttttttttygtattatgagtaatttgaagtyggayggygagtayggyggtagtatyggtatyggtttyggygygggtttyggyggygttttggaggaggaggtgggtttgtggtttygggatttgtygggtgaagygtaygttaggygggygygggagagggygagyggggtttgtygygtttygyggggtyggggtggttatygttttyggygttttttygtygttgttttttygttygggtaggagyggttygtgttygygggygggagygtgyggtttggattgtttygtyggataggtattgttttttygttttttygggttygaggygggtygygygygtyggtygtygttygggygtttygyggtgggygagatgygtygygttygttttatgtttgtygttygygygttttttgttttttatttygtagtygttygtygttttttttygaggygtattttttgygtggttaggatttygtttyggyggtayggagyggagygggattagtayggttygagggyggtatttttattttattgtttttttygttttgatttttttttygtgattttggaggtttgggtyggtyggtttttyggtttttgyga

SEQ ID NO: 11323 - DNA, 717 bp, Artificial Sequence
  Description of Artificial Sequence: Synthetic polynucleotide
ygaggagaaaggtygttaaayggagygagagtttttatttttatttattttagtgttatggtggtatatgtygattattatttgygaggttttttygtagatttgttttttyggtttygtagygyggaygattygtagygttttayggttatggttttttttataggggtgagtttgtttttyggatgggtggtgaagggtgattttggatttgatttttgaatygtagyggtttgtayggggatygygggygtgttgattttatgtgtttygtttagttgttgtagagtyggtttatygtayggtttttgygggaggaggttattttggagygattttttatttggtagggagatttygaatttattgtgygttggttgggtttgttgggtttgggttatttygygttgaatygtaggaaggtgtgagagaaggggaggggtggagaggggtttggttyggtygyggygaggtttgtaagaggttgatttygagttttagtaggtgyggtaygtgagtaygttgttgtyggygtttttgggygtattgggygaaggygaygygyggttygtgggtgtagygttgggygttttgaggaggtttttgttgyggtttygggygtttgtgyggtttttgagygyggagttgggatygygttttttttygttattggaygaygtgagtaaaygtttygttttygggtttygtttttgtygt

SEQ ID NO: 11324 - DNA, 1713 bp, Artificial Sequence
  Description of Artificial Sequence: Synthetic polynucleotide
yggtagygaattaagttgygtaggygttttgtttttttttttattaatatgttygattggtttaygattgattatattattggttygygtaattttagtaggtttttgggtttgtagttgagtygaagtttttttttttgygtagyggggyggggtaygatggtggyggggggggaggggggaattgttttattaygtatgygtatyggggatggygatagggtttttttttttgtttttttttatagttttttttagtyggggggttgagtgtttttttttttttttttttgttttttttttttttttttttttatygtttagyggggtttttaattgatagttgtygtygggtttygttygtgtatygtttttttttgttygtgtttttygtaggtagaggggggygggagggggtgtgagggagaggaggagtyggagtygtygttgyggtttttttyggggaggggagaggagaatttttttttttttygtttttttttagtttttygttggttygggagggggtggggygtygaggtygyggygattyggtagggtttggtyggtgaagagtaggygggyggggtgyggaggggtgaggtyggygagggtygtgygygygtygtygtygggggggaggggagaggagggtatttaggttttttttttttttttttttttttygygygttatgtaatttygtttygtyggyggtgagtttaagattttygygygtatygagtygagtyggyggttgaggagagttaggttygatgtggygggggttaygygtygyggtygagtygtgaggaagyggttygygtttaygygttttttagtatttygagyggttgttttatatygtttagtttaggtttgtyggggtatgagtgtgttygggaygtygggagygatggagtyggttggggaggaagagyggtygttatyggyggtygaaggagaggaygaygaggaggaggtggtagyggyggtttagattttagggtyggtttayggaaggagtgttttttygttggaggaygyggaygattaggaggaagagatggaggygatggtgatyggaggyggttgttgtaaggagtaggagttgatttaygagttatagtagggttatygtattttgggygagtttttgtaggagaagtatyggggttttatygttttttttttgtagtttttggggggygttgttatygyggaggaggaggtggyggaagggtygygtagygggggtyggggyggtygygttttttygtagtagttyggatagggtatgtgtttgttgtagatggaagagaagttygttagyggttagtaygggggtattatygagttygtggyggattttaggttgatgttggagaygtgttatygtttgtayggagtggattattggatttttaaatagggttagaagttggagatgatgttggagtagaagttagygtttttttttyggtaagygagttyggttttyggtgggattgatagattgatataaatatatatttataygtgttygaggatgggttgggttaggggtttgggggyggygttgataggtgttgagtyggtgttggagaagttygggaggaggagyggygttgggyggggatyggaggggtgtggtgggtgtgggtygaattyggtttgygygtagattgagaaggaaattygagtttgtagygt

SEQ ID NO: 11325 - DNA, 699 bp, Artificial Sequence
  Description of Artificial Sequence: Synthetic polynucleotide
ygygygaatygttttattttggatttttggaatygtgtttaggtattygggyggyggggttygtttaggtygygttaggtagttttgggtyggtgggtgtygggtttttttttttttygttttatttggygygttygtagygtygtygtygtygtygtttttttttttagygggygttyggagtatttygygtygygtttttttygtttyggttttygttygtyggagyggggtttaygtygttggtagttattaagtggttygttaaggaaatgtaggtgagtgygtgaggtygagyggtagttgttggagaygtggggtgtgtgtttgtgagtgygagygagaygaggagggagygttagygagygagygagygagtgygggagyggtygtttyggtttttygtttagtygygttygtagtyggyggtyggagygygtgggggtagygtttygtttygatagagtttygttttttttttgtygtttyggttgttttttygaggagtygggagtygtttatyggtttttttaattttgygttttttttttagttygagttttttygttgtttttttttttttttttttygagtttttttttttttggygyggygtygttagttagtttyggyggggagagtgtaggtattttgtttttagaataattagtaggatttaagtyggtttttygagygygt

SEQ ID NO: 11326 - DNA, 1191 bp, Artificial Sequence
  Description of Artificial Sequence: Synthetic polynucleotide
yggagygggygaggayggttagtttttgtagtgtttaggtttgtayggaagygttttggtataatttagttgaggatataygttttttttygygtagtyggagggttgaatagtaaagtatttttygggggaattgtgtgttagygtagtttggagagagtaggtttagggggtagttttattataggagataggataygttttagtttgggtaaattttyggttttttttggttttaagttagtagtygtygttygygatttttttttttttttygtygttatttyggtygttttgttagtttygaatttgttygygtttggtygygyggttttttagtttayggggttggyggygyggttgggatgggatygatgtggygtatgygtggtggygttattaggygygggagttgttgyggyggggayggtgttgyggayggtygagggttaggtygtttyggtygggtttgtggtgggggtagttttagyggyggyggyggyggygtgggttggygaggtygygyggayggygttygatagtagttggaggagyggtttgtygatttggyggygagttatttggaggttattygtgygygggaygagtgggatyggtagaaygygyggttgygttaggagaaygttyggttgyggttygagaatyggyggttgaagygygagaatygtagtttttttygttaggttttgyggtttttyggygaaggyggtaaygggaygttygyggaggtaygtygggtttttgaagaggttagtaygaatyggagggttagagatagyggtygagaggaygagtygggtagttttagggttttgagggttygatttgagaagttggaagttatgtatygtygggttttgttgtagttgtatttygagtagyggggattaygttygagyggggataaggaggagtagtttttataggaattygatttyggttttygttttygggattyggagttttttgggttttggttgtagtygaggtygtagtyggtgagaggyggagtttygagygggttttttttttttygtttttagttattttygatttygygtaygttttggttygttttttgttygyggatattttggattayggtgttttttygtttttattagtggatattttygggtggygtttggttattygtttggtggaggtyga

SEQ ID NO: 11327 - DNA, 536 bp, Artificial Sequence
  Description of Artificial Sequence: Synthetic polynucleotide
yggaygggatgtaaagtttgggtgagayggttatyggaygtttattggaagggtgyggggatttttaygtygatatttygttttttygttttagttygygtatttatygygtaygtagagtagtgatatggtygaggatygggtaagtttttgtygygttttagtygygtyggatygttttttttttttttttagtaggtgtygygattgttttygttatyggttttaygggtttggtagttttttatggtttyggtygtaggtagygtttygtygttgtttyggattygttttaaattttatygtttgagygaatttygggtagyggtgagtatyggtyggtaggttggggattgggygyggtatagygaygttatygttgggaggtaggagttgtygggattttttttygttattttattygggattygygygagygtttgggyggagttaattygtggtgtttygttttttagttaattaatttaygtttagtttatygatttygttttttttygygagtaygtaggaggygg

SEQ ID NO: 11328 - DNA, 728 bp, Artificial Sequence
  Description of Artificial Sequence: Synthetic polynucleotide
yggttaatayggttaggtttttygggygttttaaggtttygttaattttggtaaaggyggtgttgaggtgaattaygtggatttgaaaaggataygagggtaggagagggttaygtttttggtttygtttygtttygtttttttgttttttttyggttagtttygygtttatttyggtagggaaayggtggttttttatagtgtgtttygagttyggaygatttgtagttttttagtgtagatgtagttgtagagttyggtattttygttygggatttagagttatttttagtttaggaggtagggttagttgtattgygtagggagaggtaagtgagtyggtttygttyggtagggttagtttaattttygggtaggtattgtygygayggtttttttttttgygtttygttttatttttaagtttyggyggggagatttttttattattgtggttattgttgygtaggygtagttttgggagyggygggagttggaagtttaggagttttagggggygtagggtygggtagaaggyggygagttgggggyggatatttatyggggattggaagyggttygygtaggttggggatattyggggttagggygggtygtttggggtgggagagtatagtgaggaagtttgaygtttaggttaggaatttagggaattygggtagaaaaggtgagggggtgggayggtgggyggygggtgggaygttygg

SEQ ID NO: 11329 - DNA, 1431 bp, Artificial Sequence
  Description of Artificial Sequence: Synthetic polynucleotide
ygagttaygttgtttttttgggagtttatygtygaaattaaagttatttttygtygggagtaggtaaaaggatgaggggaaagaaaattaaygaattatttttaggaattgaygtttttgttaatgattyggaagaaataaaygtagttttttygtttyggttttgggttagtttaygtgatttttttgggaggttaaagagtatygttttgttttttttgttgttaagttaagttattttaygyggygtagtttygattttttyggtttygygtagttttttttttaaattyggagaataagttttatttttttygaaatgagaatttttttattggttygaatgtgtagtttattaaattaaaggggyggggaatttttgtttttattggtttttttttttygtaattttygttttttgttgagygagtttagtttttttttgagtttagagygttttttattttgtygggyggtttttgattggtggaagtgaggtaaggttgggtttygttttttttttygttygttagtaggttggagtyggggttagttttggtatttttttttagttagtggttaatttttggtttagtggggattgtgttygtttttttygtttttttttagtttttttttygttatyggaaygagtttygygtttggtaggttgaggaggagtaaagaaagtaggattaaagagaaggaagatttggttaggtttgggtggygtttgtagtgttagaaagggaggyggtggyggyggyggttgygattayggtygygygggaygtgaggttygagagtaatygaygggtagyggyggtygttttagygtttygtatyggggtygttagttagtagaaygygagtttttgtggaggagtagggtyggygygaggygagattygggagygtgagyggggtttttggggygtygtygttttttttygtttyggygtygggggttgtagttttggttttygtttttttgtygggttagtttgtaggyggagagagtyggayggygttyggagygyggatttygttttgtggaggatagygygtyggttgyggttttttttygattttttttgttyggygtttyggttygggtygtttaggtgtaggtgygtgyggtttyggggtttggggaygtygtagttyggttyggggagggggygttaggtygggagtygtagygygggagggaygagttygggtyggyggggggaggggagygggaagygtttttgttgttggygatygggattttttttyggtataggggaaaggyggggaagttattttttatygggtttgtgtttttgagaggattttttgatggttgygtgaaggggagyggtaggatagtttttgyggttygtggagyggtyggagttagggggtgggggagggaggatygatyga

SEQ ID NO: 11330 - DNA, 588 bp, Artificial Sequence
  Description of Artificial Sequence: Synthetic polynucleotide
ygatttattttgygagttygggtgggagttttaggtttgtaggggtygygtggygttatttttygatygygatttttaatggygagttygtgyggtttttagtgygtygtttttttttgygggtyggtggggtttgygagaattyggggttgggggygggtttggtagtggygggyggggatttygggtygggatygagaagygttttygaayggtagttatattggggttgtttagtggtttgagtttttttttgttttttttttatatttttttgttttggygyggggggttttygyggygtygaggtttygttgygtygtttattyggagggaggagggtttttgggaggygtygygtgggggygyggttygtggagttygggygttagggatyggtyggggtyggygtaygggtgygttttgggttygttygggtygtgggagttagggagttagggagttagggatttyggttttygtayggggtagataggggtagygygggygattyggagygtttgygttttygyggttttttttttaatagggtaaatttaggggtttgatttygygtttgttttgygg

SEQ ID NO: 11331 - DNA, 1203 bp, Artificial Sequence
  Description of Artificial Sequence: Synthetic polynucleotide
ygtttttttgaagttygttttttagyggtttggagttyggggygtggtyggttygaatttgttttttaggtttagaayggagttygtagttygtaattygttgtggtygtagygggtygygtttttygttttygttttaggagyggtygaggatttgtttagttgygggygttaagttttggtygtattttttttttyggyggagggagtyggttggygttgyggtttttaaggygygyggaygtygyggagggtagttagtygygygggagygggtagygygygygagggygttgggygtygtygygaggyggggaagygyggggtygyggyggtgygggttttagggyggyggtygtygtygtygtagtagygtttygagyggggagggtygaggaggttygaygagttggggatggagagtatygggttttttattgttttagagygygtgtgyggttttgggygygtatagtgayggtgayggtatttttggttyggtagygtygaggtygtttygttagatagttagyggtyggyggtaggtygggttatgagyggtaggggtygggtygggtttygttgattttggtttygygyggtagtttttttagttttygtttyggtttttyggtatgagagttygttygggttyggggttgyggttgttttagattygtygtaygttggygygtttygggttygyggagtygyggtgttgatatttgygtygtattgygtygttygttygttygttgtgtgtttygggggygyggttatggaggtggtgggtgatttygagtatagtaagagggatttygtgggatayggggttttygtygtggtttttygggggyggtatygttaggtgagygtyggtyggggygaggtygggtttygggyggtaggtayggggttaggtggttttgaaatttggygtagtygygagtygagattttygattyggttagtygttygggtatgttattgtgygygtagttygtttygtygtttgttttggttttgtgagggttgttgtgaggtttaagtttttggtagygtttygtttatygatyggttgttgttgatttttttgtgtgttyggggtttatttygyggttygttygtaggagygtttgtatttaggttattttggatttaaaatagayggtattgtatygtgtagattygagggttgggygt

SEQ ID NO: 11332 - DNA, 5370 bp, Artificial Sequence; identical to SEQ ID NO: 6909
  Description of Artificial Sequence: Synthetic polynucleotide

SEQ ID NO: 11333 - DNA, 1691 bp, Artificial Sequence
  Description of Artificial Sequence: Synthetic polynucleotide
ygagaataaaygttagtttttatttttgtggaaygtttaaygtagttggttgggggaataygaggttttgtagggagygagtttyggtttyggtttgayggaatataggygaygtaygtgaagtttaggttttattttagygtaggygggtttttagygatttatagttgttatatattyggttagygtygattttygaaggygtattttttatattttatttygagtatyggttttatygttagggaaggtttttttggatagtaaggtyggggtttaggatttgygagatttattttattygtttygttagagtttaggagtagtaataggtttgygtttttttygggyggygttttgtagattttygaygggttaagggtgtttttagtttagtygtgygtttaggtyggggagatgggyggaggattggggttttygatttttttgatagtttttgygygttagaaattgagtagatayggggttygygttatttygttygtygtttgttttatttygygaggttgygtttttattygggttygggagggtyggttygygtttygggtatgaatggggtttttttttttaatagyggggaaatttygttatygttttttatttyggttttyggagttygyggtggygtaggtttgtttagtaagtttttgaatyggtagataaaggggtatyggaggaaaagtygagygtttttttaaatttatyggttatttttttttttttaaaataaaggagtttttygtygattttygttttttttygtaaggygygtyggtatttyggggagyggttatttyggggtattgtttaggtttttgggagygygtygtattttagttygagygtygyggggatagttggygatttgtatttataggagttttaggggygggtggagygttygggygtttygagtygtyggtyggattttggagggttagygygggattygttttttygtagaagtttgyggatttygygttyggttygtygagttttgygtatttatttygtygygagtagygtaatttgtggyggygtygygygttyggtygygtttygaatttttttttagtyggtagttttygagtttyggtygtgyggyggtygaagagggttyggygtttyggagtagtygygygtygttttygggtygttttygtttygtygtygtygagtttyggagagagygygggygttggaaagtttyggtggygaatggyggtttgagggygttgyggyggyggyggggygggggygttggyggtttttygtttttaagygyggagtgggggygttgaggygggtgyggyggyggyggyggyggtagygggagagggygggatagygggagggattggtayggatagtgatttttayggggagttgtygygagygygyggattttagttaggaggatygttaggggttygttttygtygtyggttttttttttayggtygtgggaggggattyggygtattattyggtttygtttttgygtttygggggagtygygtttygaattagttttttttttaygagggtagggatttyggttttgtttttttttygyggtttttagtggggattygygttttaatttagtttttgttttayggtygggggattagygtttttattaagttygtttygtttttttaygt

SEQ ID NO: 11334 - DNA, 1223 bp, Artificial Sequence
  Description of Artificial Sequence: Synthetic polynucleotide
yggaatgttatttgtttygattgttttygggtggttataggygygggggaaggygtagggttaggggygttgagggtgaaayggtttyggygttygggyggyggyggtggtygtttgyggtagtttagttgaaaygtagyggaaattgtagttagttayggggttgygggaggtaaggtaggaaggtggygttgtygtygagygtttggagttygagygtttattatggyggtaagggtaatggtygttayggggagygagtaygttttttygygygtataygtygtygygtygggttttyggggttygttatyggygtygttgtygtygtygttygtttttttatttttttttaygggttgtagyggaattttttttttagatatygtttttaagatggyggttttttttttyggtaattttttttatygttttttgtagtaggygtygagtygtygttattttgtttttygttttttttttttttttatygatatttatatagygaaaatyggttyggtyggtttgyggtttttattttaygtttgtagttttygttttttygttaggttttatttyggygyggtgttttaggtyggtygyggagtygattyggggtttttygatygttttyggtataatygggygatttttttttaattttygttygtttayggagygygttttygtygtygttyggggtagtygggttttttttygggtttaattgyggttttttyggggtttgttyggygtygygygttaygtygttyggtttagygygggagggygttttgygggtygtygattaggtygagattaggtygttgtgygygtattaggtttygyggtygyggyggtattygggatttatyggayggaygtgygggyggtyggygayggtggygggtgttgtaggtyggtttttttttggagtattgggtygggtttyggttggtggggygggyggagggagggaggaggggtygagttyggagttgataaaaagyggtttagtttttyggtaygggttygtygttagtaygttaygttatygttygggagagagatttaggaaaatgyggaagggtagataggttttttttttygttyggtgggtttttttggtatttygtgtyggygtygttttygtttygygatyggggagtttagtggtttygttgyggyggggttttyggyggtyggagttttygtgatagygt

SEQ ID NO: 11335 - DNA, 1103 bp, Artificial Sequence
  Description of Artificial Sequence: Synthetic polynucleotide
ygaggtaygtattaggggggatttygtattygtagtttttygtttygtatttygtagttygggayggtttttggttttyggttttagygaggtygtygaagtygtagtatttagttttggaaggttaggtagtygggatygtagggattagtttygagyggyggyggyggyggggtagaagggtagtygttttttygggatttaggaygtyggygggygggaggtatataygygygtataagyggaaagaaagygggtttattgygtggggatgttygttygygtagttgtttyggyggyggyggtygttgtttgtatygaggtygaggygyggyggtggyggyggyggttgyggattgagtttttttygtygggyggtggatgtagggygygggaggggygygaggggaggggtgygygtttgggaggyggggagggaaagaggggaggaagtaggagygygggggygggygyggttagttaggggyggggyggggygygygyggggtygggttttgtttattgtayggaggttgtgtgyggggygygygygygggagayggtyggaygggygtggggagaggggyggtttgttaygtatttygygygtttaygtgttttygttattggagagggtygggtaygyggagagggtggttgyggggaygyggtggtaggttttttttygaggatyggttyggattygaagatygggaggagggygggtygggggygtttygggttttttttttygygtagyggtttttagaggtttgygggagttaygaattattgtaggyggttggggttggggaggtgggagtaataaagatagttaagtgagggtggygtttygttttatyggggttttygttaatttgygtattttttgaaaagyggtttygtttyggggtttaygtygtttyggttttygatttyggaattyggtggtttgtagyggygtygaaaggtttatygaygatttttttttttagtagtaagtyggagggagttaaataagttttatttataattttagtgttattatttagagygttttaaygttatttagaaagtatygatggtaaagyggygygtggygt

SEQ ID NO: 11336 - DNA, 616 bp, Artificial Sequence
  Description of Artificial Sequence: Synthetic polynucleotide
ygtatttaatggygattygatagttttatttggtatyggtgttyggttygtggggygggtggagggtygggtagtygtagggygygggttttttygggtggayggtgttyggtygggtygggtygggtyggggaggtaggygyggggygyggggygyggtgtatagyggggagygygtagggaggygaggaggygyggattgggtttygttygtaggagaataaataggtttttttyggtygttyggagtttygtttttygttttttttttyggtyggtttttttttttgttttttttggggtaggtagaggygtttggtatatttygtatattttttygttagygtttttygttygttygttttttttyggtttygtttygyggggttgttggagaaattaagtttggggttttttttgtygagtayggggygagttttagaaggttttgtygtgatggaaaatttttaggtaaattttttygggttygtggtttttaggtygggaagttttygttaygtgaagggttttygtttttagttgygygatttggtttyggtatagggttaaygatttttatagatgttgtygggttaatttagtygagaattatygt

SEQ ID NO: 11337 - DNA, 206 bp, Artificial Sequence
  Description of Artificial Sequence: Synthetic polynucleotide
ygttaaaggygaygtgtyggtygttagttttaggtygagtttygagygtttgtaggaataygtttttttattyggygygggaygtagagttgygagagaattttgtttagygyggatttaaygttagggygtygtttagaggttggtttttgtttyggttttattygtygggagattatagagttgtttttttagtygttygtygt

SEQ ID NO: 11338 - DNA, 1141 bp, Artificial Sequence
  Description of Artificial Sequence: Synthetic polynucleotide
ygtattaattggygtgtgtaggygttgttgtttygygttgygtayggagaagygtttygaatttatygtaygatgyggagttaggggtagygagtgagyggyggtttttagtttttttttgttttttttttgttttttttgggaatggtagggggttttttatgataaatgttygtaaataggatagggttyggaygattttagagtyggygttttttttttatatttttagttttagggtyggattygttttygyggttgttatygtttttgtttygggygtttygyggggattatttygttaggtgagygtttttaggagtttttttgaaatttatttgygtgaagtataagtttattagygtgagggtgaaaaattgtaggtatatagggaagtagtagagtagttagaagaygaaggggttgagygaattggtygttaygaagtttttgaagtagaaggagaagaggayggttygtagggaggtttagaagaggtagagaaagaggaagaygttttggtagttgagtygtttgtggyggtaaygtagtattagttagagttgtaygtagatgaataygaagagtagygygtagaatayggtgtagaygayggtgaggttaagttttaygtaggggggtayggtyggggttagygtgggyggtagygagtygttgygggttgggttttayggyggggtttttatygggtygggggygttgtygygyggtyggggaygttygggttttatyggggtttayggtygtygtygttttygygggggttttygygtatygygtttagtttgtagtttygagattggaggaaagaaaataagtygtattttttttttyggtattatatgatttattgggayggtttttgtttgygattggtagygtygygttygtygttttygygygtygatyggtttygygygttttygtttyggttygygygttttygtttyggttygygygtttyggttygttttttttygggtatygygygttttygtttygygaatttyggttygttttattttygttatygygygttttygtagtgygygtttttagagtygtaygttttttttyggttttttttttattttyggggtygygygtttttagattgygg

SEQ ID NO: 11339 - DNA, 1819 bp, Artificial Sequence
  Description of Artificial Sequence: Synthetic polynucleotide
ygyggaygtaggaygtagagttttagtatyggtagttaagaggaygtaggaaagygtaygtatttataggtttagagaygyggaygttagatttaggtttggatagagtagtttygtaagttttaatatattttgtaaatttygaagataggagagagttaaaatattttttttgttygtaygtaggttttttttgttttttayggttygattttgggaggyggatgaggatatttttaggtttggatgggggttatgggatattttattttagattttgttaygatttgggttgtgttygttyggtgttttyggtttaygggttgtataatttggyggtttygaaattggygtgggggaggggagggttgtttattygagtaggaygyggttgtttatttagtyggaggtgaggaaygatttttttatttygttgtygggtttaagyggggttygagagtygtyggggagagttaaagggaggggatygatggattttttagagtgaaattgtgygttttggagagtttygaggtagtttygygagttttygaggaggtygttgtygtttggtaaatataaataataataaaaggaaggaaatttaggyggtagtgygtagaaygagtatagggttttgtgagggygygtagggtttaygygggtgtttttaatagggttttttaygtaggyggygygggtayggggtygggggygygyggygtttttagygggagggygtttggattaggggtttygtttttttttagygtattttygtttttttttagygtattttygtttygygttaggtttattygtagggttttttttagtaygttygyggtygtagtagttagtttagtatttattttygaagttygaaatgattttatttagttgygygttgatygyggggttygatatgatggttggtgggtagygggtygygyggagggtagyggygaggaagygttttyggyggggttygggttttgygygttggttggggygtygygttygygtttttgtagtgtagagttagtygtyggaggagtttttaggttttttggtttagttgaatgaatgggggaggaaggygggygtyggttttttttygygygttgygttttygtttygttttygtttttygggyggattaggttttygtattygtatyggtttttttgtttygtattggttgtttygttygtttgttaaggttaggtttggggggttggggttygagtggtygttgggggatagttttgggtataygatyggagygtttttttttttttygtttggttygygtttaggggayggygagagaygyggttttagttttttttttygggygtttygttgyggttagatgtgggyggatgtggaggtygggttatggygaggagggygggygtttagaggggaagagattttttttttttttygggygtagggtttttttgtaggaggttgtatttgggtagttaaataaagttttttgttatygtygtygygygttttgygtttgtaagggttaaayggtagygtaygyggttggtaggtaggatttyggtttgtgggtttaagagtygaggggygtagggygaatatgygagttttatggtattagygagaggttattaatttttatttatygagggtatttttgtagttaatatttttattaygattatygtttygggggttatygttgtatttttttgggtgagttttggagaaggtattgttygggagaaggggtatagggyggggatggaatayggttgttagagaagttagggaygggygaygt

SEQ ID NO: 11340 - DNA, 1813 bp, Artificial Sequence
  Description of Artificial Sequence: Synthetic polynucleotide
ygagtttattttattaaygttaaattygttagtttygttagtyggttgtaggatygagggagggtgtaaaaggyggggggyggagggggggtagattagattaggygaaatttaataagtttttagttttttagtttaaagtttttattatygtygttattaaygagttattttaattgagttagtatygtygtttattygtyggttygtyggaatygygtttattttttgtaatttygttyggatyggtatttygttttttyggttyggttttttttttttygtygggtgtaaagttaaagatttagtaaggygaygtgaatttttgtatgtagggtatataygtygttttyggtttygggagtgygggggttygyggygyggagggaggttgggygttygggttttygggttaaggtygtygygygtgtttatttatgtttyggyggtttyggtttygttggtttyggygttygtttagatttyggttttygtygttygttygagtttttaaaggtgttgttgyggtaattttatggygatgagtatttgttaaayggygagtygygagttggtygttttagttyggggggygtyggggttttygggygygyggaggyggyggygagyggygggygtttyggtyggtttygygtttttygttygattttgtygttttygtygygttatygatttatggagagagatattaagggggaaaatggygttttyggagttygaggagttttggagtaattatatttatatatataygttygtaygtatatatattygtatatattggtatataggygygyggygagttttgttaattttagtaggagttaaaaaaaattttatatatatatatatatatatatatatatatatattttygttttttygattaatgttttttttttttttgtttttttttttttttttttttttttttttgtttttttttaaaggatgggttggagygttaaaaaatgttggtgggtttgggttygtaggaggyggygygyggagggygagggygtttttgttgagttgtgtagttyggttygttgagttyggyggttttgttygttygttygttygttygyggtygttagtgttgtygtygtygtygtygtygtygtygttgttgttttatggtygygttygtttygygttttygtygygtttygtygtygttygttygygttttyggtgagygttggagtggggtygggttygtgtgtttgtttttygygtttttttygaatttyggatttttagtgaaaggaagggggagggygygggygyggaagggaggtggatyggagyggtagygyggtttagtygaaygggtatygatygttatttygygatttttttygtagggggygtyggygtttaagttgttygttyggagggtttagagtygttttttagattagagtygggggaggygtagttagtagygagttttgagygatttttttttttattygtttttttgttttagtgaatttttgttagttgaagggagyggggtttttgttyggggaaaaggaaaatagttygtggtttgggatttgggattttttgtygtttttagygtttttttygtttttyggygtttttgyggtttagtggtttttgygygtyggagttygtygygaagattgagyggtygyggggatygtygygggtttygygygtatttttgggtttaatattgttattatttgatataataggagtagtgtygggggggtattgygygtttagaygtgagttgtgataggttttygaaattgggygt

SEQ ID NO: 11341 - DNA, 1872 bp, Artificial Sequence
  Description of Artificial Sequence: Synthetic polynucleotide
ygtggatagaaagtaygygtaaggggtttyggggataggaagttattagtttggggagygggaggtattggatattttttygtttygyggtyggtaygggtgygygtgyggtagyggyggtaggggtttttygttttgttyggggttttyggtygtgtttygtygttygggtygygttyggggttgattygtattattttgtaaggaagtgaaygtttygtaygggaaggggaggygtttgygtyggtygtygygtagtttyggggaygttyggggttgtygtyggttyggggtygtagaygatygygggaygygygagtttttygtttttttttgttygtygtttttttygttatttttgttygagaggagttaaattyggtttttagagttyggggagggtggggatattyggtgtttttttygygttaggaggaagggggagggyggagaggatttttggttagtttgygtygagtagatttaaattaaaataaaaagattaaaggagtagyggtyggggyggtagyggtttttaggtygggatattyggggtggtgygttygggtttgygggggttgygtyggygtyggggaggyggggggagygggagygggygaygyggggaaggggggagttagggggagggygtyggtyggaggaggggyggattygttygttttagtygagtagagtatagtygagtygagyggttygggygggggtygatttyggttagygtyggygtagagagygggyggaggygtaggttatgttgyggttggtgtttatyggggttygggttatygtggatatgtygtaygttygttattttttggatttttagggtttygttattttttaagttatgtagaagttggtggtgattyggttgagttttaattttygygaggtygttattttgagtygggattgttyggtgtygtttttyggggayggagattttttygttyggaatyggtgagttyggygttttttaattttaygttttygttttygtttygggttygygtygygtygygtygttttygtagtttttagttygttygygtgtttatatttyggygygygttygggygtatagtttgagtttgygagatttygggaagttgaattygtygttatttggygaaggygaatgtgatgtgattgttgttggtgtgaatattygatgttatygaaygtttttataattgagggttattttaatttgggatttttttttttttttttagtttttttttttttttttttygtttttgaaataaaatygaygggatttagaaggggaggtttttygtygggtygttygygygtatttatagtttttgygttgatataatttttagggtggagygggagtagtttggaygtaaattgygaygtttaggtaaaygtgtttyggaggaaggaggttgggattyggttggttttttttgttttttttaggttggtagtygtttygtagtggyggagtttgtygttggatgtgtgggtgtgtatttygtyggtgttgtttgygtgttgttagtgtagtgtgattgttgtttgttttttgagtgttaaygatygtygygtggygygtgtttygggtagttgggttagggtyggggtgggggtatggttgtttttgtyggtaygttttgtagatatttaggtgatatygggttgttgygagattttttggtttttttatttttygygttttttatygtygtgttttygttttatttatttttagtaattggygaagtaatagggaggaaayggattttattttttatyggagttatgttygtttaggtttttgtttygtgggtttttggttgttygatttgattggtaaggygt

SEQ ID NO: 11342 - DNA, 652 bp, Artificial Sequence
  Description of Artificial Sequence: Synthetic polynucleotide
ygttttttyggtggagayggygaygtggtttataygygagtttttygtygaggatgaattattagttagttygagttgttatattttattttagtatagttatygygagagtttyggggtygygtyggygtgttttaygtaygygtagtttttygyggggtyggttagtggtgtygtygaggyggggggagtggtygtygygtyggtygagtgaggtagggttataygtaggygtattygygygtygatagttygtgtatygtgtggtagyggttgtgygygtttaggaaggatatttygttttygtaggtygtygggyggtagtagggttgygygygtattygttttygtygtaggygtygtygttggygtagtygtygtagttygaggtygtagaygygygyggtagtttygtaggygtttgygtagtagyggaatagtatygtttygtyggaygygtagtttaggtttagttygtttaygygtatttttagttygygtagttygtaaggtygygtttttaatygygtaygygygygtygtygtyggggtttygttygayggygyggatttgggggtygtttagtttagggygttagttygygtagttttatygtattyggggttttttgtaggagtgtayggtttgyga

SEQ ID NO: 11343 - DNA, 722 bp, Artificial Sequence
  Description of Artificial Sequence: Synthetic polynucleotide
ygtttttygtagyggtgtagygyggtygtatttygtattygttgtttggtgtygtggtygttttttygggtagtttttygggttyggygttggyggtagtggygagyggyggagattttttttyggggtagtyggtgttygaattgatygygtagttgttgygygttgagttttattttgyggyggtyggaygtttyggygtagggggyggygyggygggygyggtgttgggtatygataaygtgtgygagttggyggygyggttgttttttagtatygtggagtgggygygttaygygtttttttttttygagttgtyggtggtygattaggtggygttgttgygtttgagttggagygagtttttygtgttgaaygyggygtaggyggygttgtttttgtatayggygtygttattggtygtygtyggtttttaygtygygtttatggtygtygagygygtygtggtttttatggattaggtgygygttttttaggagtaggtggataagttgggtygtttgtaggtygattyggtygagtatggttgttttaaggttatygygttttttaygttyggtgagttaygtttygaagagggtygygggatggggggatttaagggaggttaggaggagggyggtttggatttagatttyggtttttatagygtttygttygttttttaggtttggggttttgtaygygtygtgagtgaaygt

SEQ ID NO: 11344 - DNA, 858 bp, Artificial Sequence
  Description of Artificial Sequence: Synthetic polynucleotide
ygttygatttaggtttygagtttttttttygattttttttagtttaaaggttgtattygttttaggtttttttagttyggttttttagtttttttttyggttttttttagtttggggttygggtttttttttyggttgagtagtygggttygygattttttttatttttttyggttygggttttyggttttttttagaggtgaggtaggggttatttagaatttygyggttttttattttttttaagattattttygttttagttttttgttttttattttgtttttttaatttgggttttygattattgtttygattttattttgtygttagggattattagtygtttttttygygtttaggggaygygtagyggtagtttttgttgatggtaagggtttgygtattyggaaattttagggtttggggygtggtgyggtttttgyggttagygggtttygtttgagttttagggttttttygttgttggattaygttttttataggttttagggtygyggatgaatttygatttttgttttttttttyggtgttgtggttattgagttaagtttggygagtygaggtgattygggtygggttgygggaggagttygyggtgaggtggtttygygttgtygggygaggtyggtttaygtggagtygggagtttgaggtttttgtaygygggagttgyggaygatggtggttagtgttattgtttaygaygttattgtggtgtgtgtgtgtgagagayggagattttagtgtgtgtygtgggtgttgtttgatyggatttaggayggtgagtaggggyggggtttatygtgtgattttggtttayggtgaygtgatygt

SEQ ID NO: 11345 - DNA, 598 bp, Artificial Sequence
  Description of Artificial Sequence: Synthetic polynucleotide
yggagatayggttataygagtaattttagygaygtttttttygygygtgttygtttyggtatttyggatatttttattttgatagaggtgtagtttagggtttaagatttggttttygggttttaagtttaatttygggttygttagtttagtaggtgyggagttaagtttttttatagaygyggttttttttttaygygaggtttttaaatttygtaaattaayggaaatgaagttaygtttygggagyggtgtttttgggaaatgtagtttagygtttyggaygtygtgtttttgggaaatgtagtttagygtttggttagtyggttagaaygttaggaggttygggtygtttatttttygaggggttygtgggttyggtttgtggaatttgtttgtttygtttgtagygtttyggaggtttttgggagtgttygttygttygygtttagtgygtaggygttagaygtttagggtttgygagagygagttgagtggttttagggtttatttttggtaggagagagggtgggattygtyggttaggtaggtgygggggaggagttggggtyggtgyggggattygtyggaatttygg

SEQ ID NO: 11346 - DNA, 1281 bp, Artificial Sequence
  Description of Artificial Sequence: Synthetic polynucleotide
ygyggtgtyggygygttagtagttygyggttaaggttatttgtttttagggtttyggtatttttgyggggaggyggtaggtagaggaygygygygtagtygygtaggagtttttaggygagtgggggaagtatygtaagagaygyggatttggagygyggttattgygttatygtagygatttgggttatttaagtyggygggattgagaggtygttgygygtgggtaggggtttagattgygttygyggtgtttgtttyggtttttatttyggaaygattgtagttttgyggggttygtygtttatatygygttgaggaygttgtttaagttaggygttygttttygttygyggttttagtygttygtagygygtygtttttagaygygygtggttgttggygagggttgagatygygttttygtyggttagtttttagtagtagygtattttttttgtttygygttttygtttyggattygygtygtygtagtttygyggtgatgagtttygagtyggtttygtygtygtygtygttttagtgttttggttgygatygygyggagtygatygtttagygtttagaggagggygaygaggtttttygygygggygattaygagatggtagtygagttttttygttttatgttagtygggttggygtagtyggatygyggtttgtgtttgaggttgggggaygygttggttygygtyggtygttttttygaagttttgggygygtttygyggygtygygyggttyggggygttgyggtyggaggagttggaagagttggygggyggtttggtgygygtygtgggtttgygygatyggtygttgttygyggagaattygggyggygagttygaggygttyggygagggagggtyggtttyggagtttygygygtttygygatttgttyggttgttygygttgtyggyggttgttgtataagtyggtgaygttgttttgygggtttatagtttgtaagygttgygtggagttagggttygygyggtygtaggtgyggygygtgaaygtggtgttgagyggtttgttggagaagtgtttttyggtygagtgtyggttgygtaggttggtaggttaggygyggagtttgtagygttagtagtagtyggaggtygygttgtttaggtgygattaggttttggagttgggtgagtyggttgyggggygggttygttttttttatatttgttyggtttagtagyggggtggggagttggtyggtgggttygaggttttgggttttyga

SEQ ID NO: 11347 - DNA, 1788 bp, Artificial Sequence
  Description of Artificial Sequence: Synthetic polynucleotide
ygatgtagttyggagagagtatygttygygtagygaygygtatagatttttttttggagaygygtttttyggygygtgyggtygagttygygtgaaatgtatagatttttyggtgaggttttgtttaygtgtgattttgagtattgygaagttttttttttttattttygygtggttatttaaagttttgtttatatttygtaygtgtagatgttaattttatagaaatatatgatgtaaggatagaaatgggaaygattggaggttgattttttygtgattaygtttygttaaygyggtgygtttatgtatayggygagtaaaygtatatagtyggtaaatagttatttttattatgtttagtttatagttaygygtggggagaaggtagyggagagggyggyggtggtaggagaagtgggaagtygygygttygygtgggttgttttttgatagttyggygttgttttttttttttttygggaayggygtttattygggggtygtaggtttaygygtygggygygttygggggggtttygtagygtygagaaygggataatgaggaygyggtgataggttgggtttttgtygyggtagtggyggyggyggtagttggagttgttygtgtagtttttgtygyggttatttttattttygttttttyggtttttatttaygtttygagggtttttttgaattygaagatttttttgatgtttttagtttgttttttttaggaggagttgttttygtygttttttygggttatggtygaygagygyggygyggaggagyggtygggggygygttggggagggggygtygggggygyggygygggygtagaggyggyggggatgtygggyggttygggttgyggygtagtttttttttttgtagttttttttttygttttygtygtygtygtygyggtygyggtttttttttggtttttatttttgttgttttygggtatagattttttgtygtygtygygygtyggtttttttgtygtygtttgttagttttattttttgttatttttttgtttttttttygttttttttttgtygttygtygygtttttttttatttygygttttttttttttttttttttttttttttttttygygggtttttygtttttttygtgygtttyggtygtttttygtttttagygygtygttttyggggatgtttygttttttttttaagagygtygggttayggtygtygtgttttttggagtttyggygagggygggtaygggttttyggtaggtgyggggygtaygygggagagttttagttttttygggagttggaaayggagtttagtttgggggygtyggggttttttygttttyggygggagggggygtttttgygtggttyggaagygtygggygggygggggtgygyggyggtyggatgyggggygtygagggyggggygttttttygygttgtggtttgtggttygggggattygaggggtaaggygtggggtggggggggtgggggtyggttgttatggygaygggyggyggyggyggttgggatggaggyggaggygggygggagtttattygtattgtattaaatyggttttaygttagtttygggatagattygygaggagtaagtyggggagtttttgggygggtaygygtaggaygygttagtagttgtttygtggtttttttgygagtaaaattttygggggtgtttggtagtygygygggygttttggtgttgggttggagyggtyggygggtttggtygg

SEQ ID NO: 11348 - DNA, 626 bp, Artificial Sequence
  Description of Artificial Sequence: Synthetic polynucleotide
ygtgaggattttttyggtatygtttygygygggtttttgtttygtgtttaggyggaggyggggtggttattgtttttttttttygtttygygttttyggyggttttttygyggttttttgygtygygttttttttaggaggygttttgatttygtatttyggttttttatttttygatygttagttttagggtygtygyggygaygygygattttttttttttgaggggygygggtttyggaygygtygggttttgttaggtatttagtggagggtyggaggtyggygattagttygagtttagtygtttygggagttggygygagtgtygttaygattttttttgttttttgygttygygttgttyggtygtygggyggtygttttagtttttttatatagttttttaaaaatagttygtttygtatygttttgtaaggtagtagggagattygtagygtgttaattygygttygtygttagggttaagtttygttttaggttttgtttygggttttttattggtttttagtgattttatgagttttttgtttattttatatggttataygyggtttaatggaygtttttttygagattttayggttgygyggagaatygaaygg

SEQ ID NO: 11349 - DNA, 1037 bp, Artificial Sequence
  Description of Artificial Sequence: Synthetic polynucleotide
ygggtttgattttygygtttygttagtaatagttttttttgatttggtttaaggtttyggttttgtygtttttaaaatygttygtaaggtttagtygttygtygggttttttygttgttttttaagttttttttaattatttgttttagatygygttatttgtaatttgtttygggttggygttatattyggygtttyggygttttttataagtgttttygtttatgattagygtttgtaggggtagttyggagttygggtggggatagtagygtagtttttggtygtagygyggggtgtagaygtygtaygtttygttttttagtygggygtatatygagtagtagtygtagttyggttttyggaygagtttygygtatggtatgygggygttttyggttattgyggttatygyggygggyggygtaatyggygggggttygtaggyggttaggygttygggtgtgtagggygggtagyggaatagtattttygygygygtttygtygtygtygttattygygtttagtagtagtagtagtagyggtagtagyggyggyggyggtagyggtagygyggggtagtttattttyggtagtatgttggyggtyggtagygyggygtggygggygagygagygagygggygggygggtaggtggtayggttttgygagygygggagtygtttttttygttttttttttttttttygtygtygtagtygggttttaaagggtyggttttttttygttttttgttttttttttttttttttttggagattatttttttttttttygatattttttygygtyggtaagtgagtgygygtaygttygttygtttattttygygttggttgygggttttgggggttttttgtttttttygggtttygttttttygtatttttttggtttgattatgatttttgaaggagaatayggataattygygggtttgggtaggatyggygtggyggtggagaagagygygtgtttttgtttgtttttagtttagttygygaggatttygt

SEQ ID NO: 11350 - DNA, 977 bp, Artificial Sequence
  Description of Artificial Sequence: Synthetic polynucleotide
yggttttggygttaattygtyggtttttggttttttggttttgttatttttggyggggttgtgggtyggtttaagattataagagggtttyggygggaattttyggtggtgttygagggatttaggtaggtyggygatttttttttaatatattttttgaagttatygagaygttttgtatttgtygygtttttagagtttgtygtttttaggttttagttttgaggttgyggtgatatttattgggtatttygggttttgtaygtttygtaggtyggtygtaggtagtyggttttgttgttatttttttttttyggtygttggttggtttttttgttttggaggtatagagggatygggygttgaaaggtgtagttttgtttgtggagggatggatattyggagttgaagatagtataggagagaggggatttttatttattagtgaaggygtygttagggygtttgtttttatgttttttttagatttgtgatatygtygtgyggtttagattttygggggyggttgtatgttagggagggagtattttagggttttttgtttttaagggagagggatagtattttttygggtttttagtttttttgggtgtggygggagagttttgggygaggttgygtttatatttgtatttyggtyggttttttyggttgatttygttttggttgatttygygtatattttttttttagygttgtaaggatygtttgaattygttggttatttyggtgatgaattagtggttyggtgtgaagttgygggtgatygagggttgggaygaggayggttattatttagaggagtttttgtattatgagggtygygyggtggatattattatattagatygygatygtaataagtatggattgttggygygtttggtagtggaggtyggttttgattgggtgtattaygagttaaaggtttaygtgtattgtttygttaagttygg

SEQ ID NO: 11351 - DNA, 6206 bp, Artificial Sequence
  Description of Artificial Sequence: Synthetic polynucleotide
ygttaygttatatygagagaagyggagaygatatttttattyggtgggggygggggygaggtttttttagygyggattygggttyggggagtgtagggygtattttttttgtgggtttttaagygaaggtatagttygggggtyggggtggagggygygttttagtaggtygggygtaygggtatttgtaggaggattatttgtttgttttyggatgggtggtatttgttgatgtgtygygtaaggtygggygagttgtagaaggtggtygggtagtatttgtaggggaatatttgggyggygtgtagtaggygtaggtggygtttttgagygtttttgttggygaaygatttttygtatattgggtataggtggtattyggyggaygtatttaggtttagtaygtyggttttttygtygtygtyggtygttttttggggygttttttygtygggttyggggtataaggttagtaggttttyggtygggggygttagyggygygtttttggtttgtagygtttggtggtgygttagtaggtgtttgygtaggtaggtttggyggyggaattttttggygtagtgatggtattygtagagttygttttyggagttygattyggataygtygtyggggttyggygtgtttyggtygttgtygtygtygggtgtttttygygttttagttttggttgttgtttttggtttyggygygygggyggyggygggygygggtygyggtttgtgttagyggyggtgygaggttaggttggtygggtagttgaagattttggygtattygggatagyggtattttataygtaygatgygygagtatttgtgttgygttagygygaaygggtyggygtatttttttttgtatagttggtagatgaattygtttagyggtygygtygygtttttygygyggtttygyggygtttttatygggttttttttgattttgagttttagtaygggygaygtggttatttygttttygaagtgtagtttgyggatggttttgggttttttggygttyggggttttgattgttttggygggyggtttygyggyggtagggggygggggtygttttttygggggtygtagggyggyggtagggggtagtggggggtyggggttygggtygygggtygtttyggygttagtygagaaygtygtgtttattttgagttyggygggygygaagagtagygggtygtygtygtaggtgtygttttygttagtttygttygygtygtygtygtygtttttttygagtagygyggygggygtggggaaggattyggtygagatyggygagtttaggttgaagttgygttygaagtatttgtgtttttygtgttygyggtttaygggtygygtgggattgtagagyggygyggggtgygtagtttyggggttgtygaagtgygyggttygygggttttgygggggtggttgyggtttaggygygtaggtaagygyggyggygagygttgtatgggygygtttygygggyggyggyggyggtagyggttyggggatygggttyggygtygggggttyggygygggygttttygtagttgggygagagtagtagtgygyggtygtygttttygtygtygyggattyggtaggaaaygggygtggattttttgttgygttttattaggaagtygyggggtatgttggygyggttygagggtayggtattggttyggtttttttttygygttyggtttyggyggtttttagtgttttyggtttattgttygggygyggyggttgygggattygygtggygtyggygayggttyggtttagttttgygttttgtaygygygtttttgttttygggttyggtagtygtttttttttaayggggggagggggttattgttttygtttttygttttttttggagttaattagygygttygtagttttttagtttggtagggtgggagggygatggggyggttaaaagggggtygggattygggggtygttyggtaggtgyggtagatgtatttgagggygyggggttttygygygygtttttggtygtttygttyggygtygtygtttygttyggtttaggtataygttyggtttygtttttttttayggtttgttgtttttttatggggaggygtaygtgtttgggttttgtgtttttttttyggggggygyggagtygttaaatgggttygtttattagygygataatgtaygtttttttttygygyggggattattygygggtygttagtaaaatagtaataaaggagaagaatggttttaaatatgttaggagggtttaattygygagtyggagtygagggggaagttgtgygygttgattgggtgggggygggggygygtyggggyggtgygggggagatygttgyggaggygtagtggtttygygtggtgtttgggaaataaataagaattygagagagtagtagggttyggayggttttygttyggattttggayggatgggtygttggatttaagaggttaagtaaaagggtttttyggggttttaagtgtggatagggggttyggttttttggtagtggtygagggygatgtttgtgttygtagttttygygygtttayggggttagagaaggtttttttygagtttgagaaggaattggtayggtttttttagtttttygaaagygygggattggagygygggygggttgggttgggtttttagaggaaygtgaatttttgaatttttgggtttttggaggtttgggaatggtatttttggyggggttygatttaggtygttyggagttttygygtggtttaaggttyggttaattygggtygagttggtygaagttygaaaygygyggtyggtttygtgygttttagtgaagttggttttttttttttygygyggttttatgtatttttatttygagygggtattttgtttgtyggttgatattagatgttaaattaagggttttaattaaggygttgygaaataaaggggttgtttgtttgggygtagtttttayggagtygtgttttttttatttttgtgaaggaaattaattttttgttattgagtttyggtygyggttaatttggaygtaaaagagaygygtgttggayggggggagggggggtaatttgtattttgaggtaggttgaggttttygagaggataagtygttttttttgtgttattaggaagagataatagygaagatttttttygtttttatttttatttttatttttgttgtygtttygtttggatttagattgggtygtttgtttttattttttgtttagtttagtttygaggaaatataaaaggtagaattttygggggatagggtagagaattttaygagtgygtagtggttttgatygtttaatattggggaataaatagttaagttatataaaatgttatatgttgtgaggaaaatgttattttattgaaagagaaggaaatatttttttgtaaagttttgtatattagatagattttgttgagttttatttaygtttaattttattgaaggtatttaattgttttggattttttttttgaaaatattttggygtagaaattaaatatgtaaaaatagagtttatatgagttataagttgtgatggggatagttgttaggtttaattaattaaggggttaattaggttggttaattaagggaaagatatttgataattttatgtttgtaatattttaatttatatattgaaaagggaagaatgtatatagtgaaatatattttgaaaagttttattttagttttaaaaatgttgtggtgagtgttagtttttttaaaagttagaaattttaaaatgagtttatttaaaatttataaatatatttttatttaaaagtaattgatgttatttttttgtttttttgagttttgattaatagtgttgatgaaattagaagtgggaaaaggatttygagatagttttggttaattttattttttaattaygaattttatttggattgtagaatagtatagggygggggttyggtttgttttattyggttttgtatatgtaatattttttttatttaatagataatagagagttagttattttgtgaattttttaaaaataataatatttataattgtaaataagtygtggggatgggaaatyggtatttttattaataaaaaaaataaaataatttttgygtgagtgaatttaaatagggttttgaatttagttaagggaatttattaaaygttattgagatattgagatttaatgaattygtttttttttttttatttgtggtttttagttttgttagygtaaatgaaatttgtttttagaygggtatagttaaaataaatggaaatttgaaaggtattagtattggaaattaattttattattyggggttggaaggagttaggttgygtaygygygtaygtatatattagygatttttaagtaggtgtagtttagttygggtygtggatygtagtygttttttgygtgatttttttagaatttgtgtattygtatgtatggggatatygggtygagatatttgttttygtttgggaagagtaaagygttattatagtgygttttygaygtyggttttggygtaygygattyggagaatgggtygygtgaagttaagttgggggaaatagygyggatttgtttttttttaggggggtttygygaaagttagtgaatataaggatttaaggtagagtatttaaggggtttttttyggttttaggtgatttttttttttttttyggggttttggttagygttttggaaaaatttygggtttttttatttttttttgyggatttygyggtgggtttttttttygaygattgyggagttygaggttttaggttttttaattttttttattttggtgtgyggggatgtygtyggggagygygtyggggtttattttgatttttattayggttggaaattaaagttaaggtaatagggagtttgtagaaagygygaagtttggaaataagagtagaagyggggaatttttgyggaggagttggttttttggggtgtttaggagaataggaggttttggttttaygggaggagtygggygggttygtatttttatttygtagagggtatygygtttggagaygtyggygttgggggtgaggtgttagygttttttattattattttgttgtagattttttttttggttttatagaagtttttattttyggtttttagtttttygagttataatyggtaggaatygtgygttatygttgtagtgttygtygttyggagggattagygtttttttgygtygggtgygttygattygagtyggtgagaggttttgtatttgtaggaatgaggggttgttgtgttagttttaggggtaygygagagataygygtagttygtttggtygttatttygttyggttyggttttaggtatttttygggtttttygttygygggtygttgtttttgttyggygtattagtataaagttgttagggatttttygtttagataattttatataaaaggagagtgtatgaaagagagygaataagggaygattygygaggttgygtygtgygttttygyggggagggatygygtttaagtattttttttttttygagttttaagtgttttttggtaatttgttgygygtttattattyggtygggggtygayggygtggttggttattttttttattttttygagagtatygtyggggttattgtaygttttttgaagtgtttttagggttgtttgtttttgttttagtgggatygtygggttagggagggaggagagygggtaggaaggttygggygggyggygggaagggygaygtyggygaaagttggtagaggygaagtttagaaggtgagaaagttataattaaagaattaggttagggagagttaggayggtaygggatttatygggatgatattgattttggggygtaagaggtgttttttatttgtgaggtgttggyggtygttagttygtgygtttyggttttaaayggaattgataaaatttagygaaattgattagaaaggttgyggygatttygattttttttttttttttttattttatttatatttgtatttygtttygtttgtygtaggaggayga

SEQ ID NO: 11352 - DNA, 574 bp, Artificial Sequence
  Description of Artificial Sequence: Synthetic polynucleotide
ygttagygttaaygaatgtggggatagttygtttggygttygyggtygtatttttatygggtagtttygtatttttttttygggtttttaagtygttygtttyggttgygggagatttyggygaattatattygagaggggggygygtggggyggagttttttttttattgttttttygttattagtygtttttgtygtygagttygtagtygttagygygtttygagtttttttaggttagaggttttygtaggygatggyggataagagggyggggattttagaagtygyggygygttygtygttyggttttgttygggagggggaygygygtayggttttygyggttygggttygagaagttggggggygygggtttttttatttygtagygggtttygggatygttttttttttttttgggygyggggaagyggtttttayggygattatttygagtttggaaaatggtygggttygggaygaagttttagaaatttgtggtgtagaggggttagggattygggtaggagttagygagaaggtygaggaygygaataaggaggagggygt

SEQ ID NO: 11353 - DNA, 3438 bp, Artificial Sequence
  Description of Artificial Sequence: Synthetic polynucleotide
ygtgtttgtttygttttggtygtttgaggtyggagttatatatagtttgtatagattygagatattyggtttygagtgatttggaaaygagtgtgtttttattgygtttaaataagaygaggatatttataaggtgygagtttttaatttttagttattggtaggggttgygtagyggtatygtttaggttttttttttaggyggtygatttatttttgyggagagtaygtttttygaagagggttgtagaygygtttttttagtatttaatttgttattttataagattgagttaagttttagttaaaatatatttattttattaaaaataggyggtttaatattaygtygtattttagttttttygagggygtaagagaatagagagtttttagattaattggaggtaaatattttattttttaatatttaaaaataatttaggygygtttgtatyggtgtggtttaygygatttttaygygygaggttagtygggttggtttagygtagatagyggtygggatttatttatttagtgygygttttttttgtttttygttgygygygtttaaagttagaaagaagaaggtgaygygggaggygggtygggttttygggtttagygaattygygatttattyggtttyggygtttgagtygaggttttagaaagaattygttaattttagttattttggatttgggtagggagggtgygyggtttttaagtttagtttggatgtttagtgyggtgtgtttyggttttttygtttgtttttyggggaggttttttattyggtggttttgggtygttttattgtggygtttttatttttggttatyggttttttttygtttaggatttttyggtttagggagtagtygaygggtattttygaaygttggggtayggaattttaayggggygattagagyggagttygyggttygaggttygyggttgagtaygaagaygggattygaggatttgtatatygttygaggggaatttgttttgggttttggtgtatatatagtatgygttttgggttggtttgggttgggttaggtaggggagatttggttgggtaygaggygtygtttaagtttttyggtygtgggtygggyggtygyggygtttttgygtatagtggttatttggggtygtattttatgtttgtttgagttttttygyggygggttgaygtygggatttgtttaatygttataaaaygtttaaataaaaatagggtyggttttttagtagtggagagttattyggagtatygtttygggtyggtttyggtttygaggtttygggggtttaggatttygtgygtgtggyggggaagaggaatttagagtttttgggttgttgtttttttygtygtttttattgtgaatattgtgyggtggggtgaaygyggggagyggyggggttagtggagtygaattttagggttttgygattgtattygttaggaggggttttygtttggtttgagaaaggttttttgaggttaagagttgggtttgaatataattttyggagtttygagttygttttttttaatatataaataygygtagatttttagaaataggaaygtaygatatatayggttagaagtygygaggatatatagagygtygtttattgggygggggtygtttgggaataaagggtttaggaggygttgtttyggygtttattttgagtttttttgggggtgataygggatgggggtggggtgtaaagggaattgagggaggagagtgygygaggaggggaaagyggtgatttggtttagaggtggggygygtattttaggygagygtgygtgggtygggatttgtagggtaygggggtgggtttaggttggtygttttatttygttttagygtttygttaggttttygtygtttyggggtygttygggtygttagttagttgaygyggggggygggggagttgttaggygygtttygttttgygtygttgggtygyggaggtygtgtagttattggttygygtatygggtygttygggttttygtattttagtgatattaggaggygataaaaggttgyggygtygtyggatttagtatagttgtatygtygagttgygagyggttgygagygagagagygtaagagtaagagagttagagagygagtaaygggtattygttttaygtttttttttagttttatygygygtttygtttgtttttttatttygttygattttattyggttyggtttttgygygggtatagtttagagttttggggyggtgtaggtagtttygggatttttyggygygtygtygygtttttagataaaggtttggtyggyggtttyggttygttgygttttygtttttygtttttttagttttttttygtttttttttttygygtttggttyggygygtttyggtyggtygtaaagtttttygggyggtagyggyggttgygtttygttttagygatggtygyggagttgagtatggggttagagttgtttattagttygttggttatggagtatgttaaygatttygatttgtttaagttygaygtgaagaaggagttattggggygygyggagygttygggtaggttttgtataygtttgtagttagtyggttyggtgttttttatatygtttagtatttygtgtagtttygtgttttygtygtttagttttagttygatygaatagaagatatatttygaggatttgtattggatggygagtaattattagtagatgaatttygaggygtttaatttgaygttygaggaygyggtggaagygtttatyggttygtatttagtgttatagtygttgtaaagtttygatagttttygyggygtttattattattattattattattatttttattygtattatgygtattygggygtyggygtggtttaygaygagttgggttygtaygtttattygtattattattattattattaagygtygtygtygtygtttagygtygttagttyggygtaatagttgtttattagttatttygggttygggtygtaygygayggtttyggygayggyggygggyggtaayggtagygtggaggatygttttttygaygattagttygtgtttatgttygtgygygagttgaatygttatttgyggggttttattaaggaygaggtgattygtttgaagtagaagyggyggattttgaagaatyggggttaygtttagttttgtaggtataaaygygtttagtagaagtattatttggagaatgagaagaygtagtttatttagtaggtggagtagtttaagtaggaggtgtttyggttggttygygagagagaygtttataaggttaagtgygagaaattygttaatttyggttttagggaggygggttttattagyga

SEQ ID NO: 11354 - DNA, 4088 bp, Artificial Sequence
  Description of Artificial Sequence: Synthetic polynucleotide
yggttyggtttggttygggataygtttgtttygygtatatatagttagtyggttttgttygaaaygtattaagtygygtttagyggtaatygttttttttttttttttygtygtttttttttygatttyggygttaygatttttttgygtttttttttttttattgtattatttttatygtttygatttttttygaggggttgatgttattagtttttttatttttttyggttattttttttygttaaagtttttttttggygaggtttttttygttattayggygttttttagygttattttttttttttttygttttttttttttttttttttttttttttaataaattttatattttayggaggygggtttttttttttttattygttattyggttttttgttttygaaattttttttttgtygtagttttyggagttttatgggttttttttttttttttttaataygtatttaaatttttggygtygtgtaggtttygyggaaaaagagagaaagagagaaagagggggagagygagagygagagtaagagagagatattgagygggtaggtygggggagggggattygygttygygtygttayggtttttygtttygtttttgagttttygttyggtygaattygygtttttgggtttttttttyggtttygttttttatagatagagttygygaaygggyggggggttygggagygygygttyggggyggggggygggttyggygygygyggtttgyggggygtttttygagggttttygggtyggggtyggygtttttygttygtttttatttagtagtagtaggyggtgygtggttyggtagatttgtttgtttttttgtagttgtttttygatttttttgttggttttaygttgygtttttttttygttgygttggttttyggttttattgttttygaggtagtttatggyggyggyggyggyggyggggygyggtygggttgyggyggyggygggygygggyggttttaygtgggtygggagggtyggggtagygtygggygggygggtygggygygggttyggtttttyggtaaggagygygyggggyggattgygggtygygggtygyggggygygyggaygggygggaaggggagggtgtyggtyggatygaggggygygygtagtttttygtttttygagtygaggtygagggggttgatggtygtygtygggtygaggyggattagagtaggagttgygggagttgttgtygtygttgtygtygtygtygtttttattgtttyggtygggttttygtygtygtttygagttaaaagygtygyggygggyggggggaggyggggggaggaggaggyggyggyggygaggggggtggaaggaggaggaggaggaggagggtygaggagyggtygyggyggyggyggyggttgggagggygggagtyggyggagggaggyggtttttygggagttyggggagggggttttttygttygygttyggtyggggaygggaygggtyggggagaygttttttatttttygggttygggtagtagttyggttgagtygaggggggagagggggygttttygygttagtgaygatttttygtaygaygttaaygttttatttttyggatygygtygttyggygttttygaggttttttttttttttygygggygtygtygaggggttggggtgggyggaaggggagggagygygygttyggatttaggaaaattttygaaagagygagagatatagagagttagagagtaggagtgtggaaaaagygaggygagtaygaattaaaggatagagtaatygaaaaggaaaatgtgtttatatatatataygaataygaataaaaatttatattatatagygatggtggtgtttggtggyggtggyggggtggggggtttgattagatgagtygtttttygygttttyggygtygggygttatggttygagtygaaggygtttttggtttyggagygttygyggtttttgygtttggygyggtygtttaagtaggagaagaaggygtagtttaggaatattyggaagtagtaggtygtttygaataygaagtygtagtygyggttttgtttygtgygtttttgtagtaggaagttgagtatttaygaggggttgygtatygagaagattaggaatattaygaggggtaggtgggygtttagygygttagttttgagyggttygggtygttataygatgtttttaaygygyggygtygygtagtaggygtygttttygtygttygagttygtgttttagttagtttaggttttattygtgttttyggyggyggygtttttttyggygttttygayggygtttttttyggygtttttgtygtygtyggyggyggtygyggyggyggyggtttyggggtatygggtttttttttgggtttttggtattttttttttttttttttttagtattttttttattttttttttttttttttttttttttttttttttttttygtttttgttttagtagttttttttygagttttttgygttttttgtttgttaggaatttttyggggagygtttttygygtygggtttttggggtttttygygagtttttyggggttttygttttttygyggygygagyggttttttyggttyggttaaygtygtagtygtygtygtagtttyggtagttatttyggtagtygtygyggtygtttttttttygtttttygtygttygggttttgagttttatggttatttttagtatggtggttyggttatttyggggagttyggttygygtttggttygggttttttgtttgttttyggtttygggttgttyggttttygtgygtttygtgtyggggggtttggttgyggttttygtygygttgtttyggggtygyggagygyggttgttygggtttygggttgttgggttggttgtttaagagttagygttaaaaaggatgagtaaaygaaaaagggataagaataaattaaaaagtatttaataatagygagaaattaaaaagtattaagaaatgttaatttaaaaagaaaagtgtaaaggygyggatggtaggagtttgtttatttttaggygttttttggtttggtttttgggtaygttaatggagaagagaaaagagagagaattggggggtgttyggaggygtttyggggtaaggtagyggygttygggygtttttgttttgtttyggattyggyggtttttgtttgygtygggygattygtattttygygggaggtttyggygtttttygatttatatgtgagtgaggtgtatttataygtaaggtagygtttgtyggtygttygtygtygtttygygtygggataggggttygttttagtygtygygtygtagttyggagttagagagtaggggagygtygygtyggttagttatttgaygtagttygtttygyggtgtygaygygattgagtgttttygtyggggagtagagtttttaatyggtttygatgaygttttagtttttttagaggatygatttatagtagyggtttttataaatygaaggggaagygygaaaaatyggtttatyggggaygtatttaaatgggtygtygygtattttgggggtgtaggtyggtgtygggatygygygggygtgggtygggggygygggggtygygatggyggggggygygggygygtttaaggyggtgggygtttaatttygttttttagatttgttttttaattttyggtgagtggtgtagttttgggyggygtgtaaagtgtgygayggyggygtttatttttgttgtgygtttttttatttttagttatttatttygtttttttagyggygygygttygtygaggtaggtgttagagagtygaattygaattatttgygaygttyggayggagtttygtattttyggaygagaaaagtgygatgggagtgtaaagttttttttgttygaagtagtaggygygtyggtgttaygggagtygaggagyggtggtygtggttgtggagtyggtgttygaggygt

SEQ ID NO: 11355 - DNA, 522 bp, Artificial Sequence
  Description of Artificial Sequence: Synthetic polynucleotide
ygatatagttttyggygygtygggtattgaggttttggagtatagygtggggggtttggtatagataygatttaygatygggtygattttyggttagaaagaattatgtttyggtygttygggtygygggttygyggtgtatttttgtaggtttttattttgtttyggtagaggtttgtaagaattttgtgggtgtttttyggagygggtagaggaggagtttagygtygaggtttaggygygtttygttttygttttttttygtgtttttttttygttgttttttttttaaaggtygagatttggaygttgttyggtggtttyggygggggttttgtttttggtygttgtttttttgaattttaggtgagaagaataaaaygttttgaygttgttyggttttyggtttttggagaggaygggtygtttttgtygagagaattgtgyggaattaggaagygttggtgttttttygtttttaygggattaagygaaattyggttttaaaygaagtaaagtygg

SEQ ID NO: 11356 - DNA, 2260 bp, Artificial Sequence
  Description of Artificial Sequence: Synthetic polynucleotide
yggtattygggtygaagygtttggttygygttttygygygggtttttttggaatygtttygggataygyggttttttygttgttggattttttttygagttttagtttgttaggtagggattttttgggygggyggyggggaagygtygagtyggyggtygtttatatttttttttaygtagtataaaggatattygtyggtaaatttttttygtttttgattygggtygagtygggaatttagygttagttttgtttttggyggggttgaggttttttttatattttaggttatttggtaaaygttttgaggttgttattttttttgggtttaaggtttaygggttgaggtttgttttygygtggagtttaaggtttaygggttgaggtttgttttygygtggagtttaaggtttaygggttgaggtttgttttygygtggagtttaaggtttaygggttgaggtttgttttygygtggagtttaaggtttaygggttgaggtttgttttygygtggagtttaaggtttaygggttgaggtttgttttygygtggatygtygagagttyggtagattttttttaaggttttgattttaatatttttagtgttttgttaattatattttttgttttttttttttattaaggttatygttaagatattttttttttttttttttttygtygttygttattttttttgttttttttttggttttttttttagttttttgggtttttttttygygttgttttttagttttagttgtttttttyggtttatatttyggtagttttttttttttttygttttygggtattttttttttttggtyggtttttgaaatttagtaggttyggtttyggttattgtttttttttgtttgtttttatttggtttgtttttttaattatygtttttttatatttttttttttttttttttggtaagggggayggggggaaayggggtattatattttygtttttygatttygttattttttttagtttygtgagtygygttttttygttttttttaggttygygattttattttgaggttttttagatttygtagggttttttaygttattaagtttgtttygattttttttygttgttttttatattttttgtygyggygyggtyggttagggatttatttygaggtttagttggtgggggtgttggggtgygygyggattyggtatttayggyggyggyggyggtagtagtagtaggaggaggagaaagaygaggaggaggaggaggattagttgagyggygttttttttttagttygtagygygtattggttttttggggtattttygggagagtattaagatyggagattaggyggygatataggtaatygttgttgtayggggttgggtttagtyggtttttagaggttagggtagggggaggtaggattgggaaggagggtyggagaagtggggtgtagagggyggggtagygagyggttaggttyggaggaaggygttttaggygtttagggatgtygtygttygggttgaygtygtyggttttttttttygttaggygggygtttgtagtygygggygtaygggtttygtttygtttatyggttygttgtyggygttygyggtgygtttygttttgtgtttttygtagtyggygtgtatttggtgtaagtaaaggyggttagttgatgggtygygygyggattggttgtttygtygtttttttttttttygttygatttttttygyggtttttygttttygttttyggygyggtttygtgttgggtattatttgtggatygtttaataaaggygtagygyggyggggttygggtggtygggtygyggtygtygttttttgtttaggggayggtaggttgyggttgggtagggaggygaagygtattgtyggtttttagtaaaagatagattaaaagaaaatataygttygtgttaggaggttagttaggtataatggggttttatttttttgyggygtagaattygggttygggggttgagaattagatatagttyggtttggggttgtgggagttaagtttyggggtgaaattygattttgygttttaaaatatagggygygttttygggttgtgtgtgygygttygggggygtttttygtagatttggttygggtyggtgtttttgtygygggaaggaggattyggaygtttaatttagyggygaagtygttttttattggaggaggtttttygaaaaygt

SEQ ID NO: 11357 - DNA, 1502 bp, Artificial Sequence
  Description of Artificial Sequence: Synthetic polynucleotide
ygayggtgagygtggagtagttygyggtttygttgttttttttattttyggatttttagtttttttagagtggaggggtaagtatatagtaagtatttgatattygttygatttttgagttttttatttgtaggagttagggggtttgtttttygtaygttttttgttggagggaggaaygagggaaggagaaaatttaygttgaggtygttggtygattattttttttatttttyggataatattgatgggttttattaaggaaagtygaattttygtatgttygaggagtgtyggaggtggttgtgygtttagttttttttggtaaagggttygaagtattygtttatttaaaggyggtygagagttatattatttgtttgtatgaygggagatatygaaaygttttttttgaaygygatgataaatatttttttttatttagtagygaygtgtaygtgatagtttttgggttttygtaattaygtggaaatttggaataggtttgyggttgtatatygttyggaygtyggggtttttgygtttttygttttttttgatygyggttgggtagtygagtygtaggtagttgggggttttygaaygtygtttttgtatygygtygtttttgtttygggtttyggtagttttygggttttygtattgttygtygygttttgtttatagggaagygtttttttaggyggyggyggttttggtgyggatttttyggtygtagttatgtgggattygygggtagttaggtgygtagyggygygggaagtattggggtatttttggtttttygggttygttattttttttggygggaggyggtygygygyggggattggygattttgaggtagyggtygaaygggttygttyggttatttttgtggggtttatagttatttaggtgtagattygagttagttgygyggggtyggtygygggggayggtttyggttttttyggttyggagggattagggtaygygttgygataggattgyggyggygygyggtttgtttagtttttatttyggtatygaagtygtagttttygggtttattttygtatttttaggggttttygggggttgtygataggtttttgattagygagygygttttyggggtaagtatttttggygggtagaaatttgggagyggagtatagyggtgtaagggaatygtgttaggygggaagggyggaatttgyggggaatttggagygygttggttttttttyggtagtaggaggtttttttttttgttygttygattgagggttgttgggttggtttaaattggattgtayggtttattagtttgggtttatygagtttagggggaaggtagtagtagggatttaaggttgggaagyggagtttttagaagtttttgtttttgtttyggagygttttygaatyggagttyggagtttgttgtttgggaggygygttgygtttttttttaattttttgttttygtttygygg

SEQ ID NO: 11358 - DNA, 510 bp, Artificial Sequence
  Description of Artificial Sequence: Synthetic polynucleotide
ygttttttgtygggagttattygttagtttttttttttagttyggttgygtagygtttttaatttaatttttggatttattttygttttagtttttttygtgtttagygttttttgtaaatgattttttyggtygggtgtttygttttttttttyggtttttttygygtggtttgtttttygttygtttgygttygttyggtttttttgtttttgygtttttatttgatygtaaaggyggttagggtagttttygygyggtttgatagttayggtttttagtttgtttttggaygtgggaaattygggtttatagygtttttaygtatattgyggtatagattggygttttttayggygtttttattggaaagygtttttgtggttttggggagagggyggttttattygttatttttttyggagttgttttygtttatttttatgggaggaaatygtagggygtgtgagttttygatttttygtttttattttttttaggatyggtygt

SEQ ID NO: 11359 - DNA, 940 bp, Artificial Sequence
  Description of Artificial Sequence: Synthetic polynucleotide
ygggtaattgttygggttttgtttatttttttygygggtygtatttgttaaggtygtatygttagygttttttgtygttttttttgtatagagattygygtttattttygtattygtattygtattygtatttgtttttatttygygttygttttgygtygaggtygygtagtttgygggtagtggygggggtaygaggatgygaatttaggyggggtygggagttgggygygttttttagaattttygttayggttaggtttgagttttatttatttaygtygtattttttttttttygtgggggtttatatggtygtgtygggygyggtttygygggygyggygatygggygataaygyggyggggayggtygygggttyggttgtggygtatygygagtygaggyggggayggttaggyggygyggggtagtgggyggygtattttttataggtygttygggatgtygtygttattttygttaygtttggatygygaggtttygygggtggtttagtagtttttggyggygygggygaaggttygttatttgttygtygtygttgttttygtgtygtygtttgtttttttatagtttygtygttyggttttyggygtygtygyggttyggttygttttagygggttygtaggaygttygygtatgygttattttttgtygygtaggggttygygttgttygggttygygtygtttygagttygygygygaatttaygygtygttgttgygygttagyggagggaaattygygagaagttattggattgttyggtttyggatyggtttttagaatygttggttyggggtttttagttgtagtaaatttyggagggggygaagtyggttaggtgggygattttttttattyggattttttattygttttygtttttagtgttttttgtttgygtttyga

SEQ ID NO: 11360 - DNA, 2718 bp, Artificial Sequence
  Description of Artificial Sequence: Synthetic polynucleotide
ygttygggtygttttttttgtttagtttygagygyggagttgtttaggatttttagaygggtgygagttattgtttgaagttttttttttttygtyggaagaggatgtgtttaaaggatygtyggaaattttggttgaagatygtgtagatgatygggttgagygagttgttgtagtagtygatttagaagaagaatttgaagagygggtygggtatttggtaggtttygyggtagatgtygtataggttgtagttgaagaagaaggggaattagtagagtaygaataygtttatgattatagttagtataaaggtgaagygtttttygygygtttgggttattttgyggyggtataygttgttgygygttyggygtyggygygataggaagaattygayggagygygagttggygygygataggyggttatygggtttyggggatttggaggyggttagygttttygatttagtygttttyggtttygttttttgttygttygtatygttygygttttttttygygttygttygtygtygttygttttgtygtaaygygtttyggygtygtygtttttyggtygttgygttgttttygttyggttttaygtyggygggygggggygygtagtgttygttttygtttgygtttgtygtygygtttagttygttttyggtagtyggggaygtatygtyggggtttaygggggygygtttttygttgagygtgygygtgygtagtttggttattyggtagatgygygygtagattaggtttatgatgaggtagggygygaagaaggagtygatgtaggaggataggatgtattaggtttygtygttgaggtygtattgygggtaggyggygtygtygggttggyggtagagygagattagyggygggaaggagatgayggtygagatgagttatayggttaygatggtggttttgaygyggygtggtgtgygttttaggttgtattygayggtttgygttatygattagtagyggtttaggttgatggtatatagatgtaygatygaygaggtgtaaaatagtatatygagygttaggtataygtygtattatatttgttygaagtattagtaggttatgagttygttggttaaygagaagggtatgattagygtggttattaggatgtyggtygaggttagygatattaggaagaggttttgtggygygygtagygttyggttggttagtayggygattattattagtaygttgtttattayggtgaagaygatgaggaagtttattayggtagttagttttgttatygygttygtygagtattggtygygyggyggtttttaggaagttttygaggtattggtaatttygtygttgtttttttygttygygtygttygtattggggttygtygttgtygttatygttagygtygtygttagygtyggggaygttatggttttttygygagttaygtygttttttttggagtyggggygtagtygyggtagttygggygttttttagtyggggtyggygttygtatygtygtttgttgttygggygygttygtyggggatygyggygtttagtagtyggttttyggtygtggtggtttygygggyggygygtyggagagygtggttgtygggtttttygtagttgtygagygtgtaagtgtagagtaggaggygttyggagygagyggygaygyggttgyggggggaggggggtaggtttyggggttttygygyggtttygttttyggttyggtttayggggagygtttyggygtygagtttayggygaygyggygttygagygggygtgtttgagyggtttygyggtttyggagtttagtyggggygtaggygataggyggyggyggttygggygtttygttttttattyggtyggttagggttyggygygtyggggygtyggtygtygttttttygggttttygygttygygygtttttttygtttttaattttattttttygggyggggygtyggygtygtygygagtttttyggttgttttygggygygggygtttttygyggtttaygtttggtygtgyggtygtygtttygttygtyggagttgygtygtygtygtygtygtygttttgygttgggygygagtgyggtygtttgygatyggtttttaatttgggtygagttgygtagyggggygggygygyggggyggggygggtygygggttttggggagttggtygggaatyggagttygyggtygtttggtygaatttgttygygyggygtyggggaggagttyggggyggyggygyggggygygygttyggygagggygttttttttagggtygtttgtagtttgygggayggggtygagyggyggtyggtttgggtggtgagttttagaagttgttttttttaagattggagtttttttygtttttttyggygtaggtatgggygtaggygggggygygtataygygygygygtagtaygggyggttyggggtttatggtttgatggtagagtaatttttygtagtttgggggaggaygygaygttatttgygtgygtataggttttgtygagtttagggttyggattagattttggatyggygtttttygttagagttattttygtatttatttyggttttagttttttyggtttattttttagygttgttggagtatgaattataattaayggygg

SEQ ID NO: 11361 - DNA, 2661 bp, Artificial Sequence
  Description of Artificial Sequence: Synthetic polynucleotide
ygygggtaaagygtgtttttyggtgggttataagtagygttyggtttttttttttttygttaagttgtttgatttttttttttaggygygygygtatatattatatttatatattttaaaattaagattygttttataggatttgggaaaagaaaaagaaaaaaaagtttttaattattatttttttttygtygatttttttttatttttygttttttttttagygggtagttaaggagagttagaggygggggaggggagagggaggagaagygaygtaagtgggtagttttttagygtyggygaggygygggaggaggagaagtagtggggaggygtagtygtttatttgyggggtagggygyggaggagggattygggttgygygttttygggtygaggaattaggaygygttyggagtttygtaygyggttaagttyggggygtttttttttttyggtygggygaatttaaggggygtagttttttgttttgatagagttggtyggyggaggygtgtagagyggygagtyggygagttaggttgagaaattygagtygggaataaagaggggtyggattgagtgtgtgtgtyggttygagtttygggtagaggtatttgggttygaggttttygttgtgatttttygagatttygtagtgttttttattgyggagttttygygtttgtyggtaaaaattttatttttggtaaatttttttttttttttttttttttttyggtttttattttttgttttttttttttttttagtagattaaatgagtttygagaagaaaaatygaagygaaagggaagaaaataagaagatttaaaayggatatttttagygtgggtggttttttttttttttttttttttttttattttttaggaagtggaygtttygttattttttgatttttgtatttttttttggggtaaayggggtttttttgtttagatttttttttttttttyggaaaataaattattaagtyggtattyggggtaattatagtggagagggttttygyggagaygygtygtyggatttttttttgtattttggggaggygtgttttttttagaatyggygtttttygygygtaaatttyggygaygyggggtygyggggtggtygtyggggtagtttygtttagygygygtygygtagaygttttyggagtygttagttatygtagttttygtygtttagtgtttttyggtttygggggygggygtttgygtyggttttygygaagygggaaagygyggyggtygtygggattygggygtygyggtagttgtttyggttgtyggtyggyggtttygygttygttygtttygttttygttygttgttttgttgtaygaatttttttaatttttttttttttttttatttttgagttatttttttgttttttttgttgttgygygggtgtttttatagyggagyggagattatagagtygtygggatgttttaatttttyggaggaggtggyggyggygggggggattyggaattttgygttayggaygagatgattttttttaaggaygagggygatttttagaaggaaaagattttygtygagattagttatttygaagaggaaggygatttagttgatattaagttttttttggtgaaygagtttgaaattatttyggttagtaayggataygaggtgagygggtygttgttttagtttygagaggygtggygggtttttgggaaatttagagagggaggaagggaaygaaggygttyggtygttyggttgagggtttygagtagatttttygtttgttttggggtgtgtgygtagttgggttttyggttygtagtgtgtgtgtgtgtgtgtgtgtgtgtgtgtgtgtgtgtgtgtgtaggatgggaggtagaggggtagggtaatttattttaaatggattagtttagggggttyggtggttgaayggttggttygygggtaggaatttataatgtttygttttyggtttttttgttgggttgaggggtgtygtgttttaaagygagtagggttgaataaygttattgataaattttttygtgggayggaaaataaagtgtataygttattttttggtagatgtttttgtaaaagtgygttaaattattaaaggtttaggtggagaygagtagagttataggygggaggaaggggaggygggygtgggttggggtaggyggggtygtttttattatyggtgagtygggtygyggggagtaggtyggtygatggggygygtattygggttgygggggyggtgyggggtttagtttttgyggttttagygtttgggttagtagttgggagttgtgggtgygtygagtygatttatygtaagggtatattttggttgtatygtttttaattttagttttttttaatygttattatttggaaataaatttataatttttatttggggtttgggatyggattaggttttaaatttaygtagaagaaaggyggagaagtagyggaagtygggtattagttttgtagggtggaaggygttttatygggttttttggttygttgygggygatagagttggtaatttgagtagagtaaatagagataygtgggtgttggttagagaaagygyggagtagggtygygt

SEQ ID NO: 11362 - DNA, 801 bp, Artificial Sequence
  Description of Artificial Sequence: Synthetic polynucleotide
yggttattaagyggttttttygtgagtttygtttaatgtttgtgygtttaaattagtagygttygaggaaygygttaattgggagaagtgaattgagggggttyggyggtygttgaggaggggagygygygggaggaggggygaggagttyggaggygggygyggttggtagtttagagggttygggyggaggtttgagagtagggttggaggggyggaggatyggggagattygttygyggygttttyggtyggttttgagtaggygtygtggtagygttygygttttttgttygtttttygtygtygttaggaygtaggttygygttagggttggyggtagggttygtagttgtyggtttggygtttttatttygygtagtyggtttygtttagttttttygygtttgattggtyggattttgtttttggyggaggtaattgttygyggattttttatttygygattttggttttttygtaagtttttyggattygggygttttyggtttttttttatttatttttttgtygggtaggttygygatttttygtttttygggtygtttttygtygtattyggttttggtatatttttattatttagttygggttygttttygttttgggtttattttagttttttagygtygtttgttgayggagygygggagttttaaggggtyggggttattyggtyggygtgggtggtgttaggttygggttatatttyggtatyggattygagttttttagtttttygagtaggattyggaggaatagaaygttaatttttttygt

SEQ ID NO: 11363 - DNA, 311 bp, Artificial Sequence
  Description of Artificial Sequence: Synthetic polynucleotide
yggttaayggtattayggaagtattagttggtatagaggttyggtgtaattatygttttgtatygtaaaaygggtttaggaagtttttaggagatattagyggtgttagaatygagaaagtgaygatatagataatttatggatttygygtaygggaaaygtttygttgggygttaagaayggtgtagtaattgaaaaatygtttagtgggygttattggtaaaagygttgttgtaaaatygttagtttygtattagaagtagagtygttagatagaattygggatttgaaattatygaagyggagatyga

SEQ ID NO: 11364 - DNA, 1048 bp, Artificial Sequence
  Description of Artificial Sequence: Synthetic polynucleotide
ygttttygtaaatttttygggttttaygttttgyggttattaygtttgatagagaaataattagtattagyggttgattyggttgttygggttttygtgtaggygggygggagyggataggttttggtaygtatgygttyggggygggattgygttttaggtttgygygttgtygttagattagygggggggyggggyggyggyggataygygttttaggyggtagtygygygagagggattttgtgtttygttgatttttttyggggygttttttttygtgtygttttttttttttttygtygygtttttgygaggygttttttattyggtgggatygattyggggggatggagggggtaygtttttataatttttttgggatttygaagagaygttygygtgygatttgagaygtygttttygtygagggtttatgggygygtttttataggygggtagtggaygtgagggyggygagyggyggggtygyggygtttaggagggtygygttygggttyggtttygygtaggtygygygygygygttttygtygtygttygggtygygttygtttygtttttaggygtyggtttyggagttyggttygygagtagyggyggttgtyggagggaygatgagttgygyggggygggygggttttgttyggttygtygygttygttttgttgatttgtagtttgtggtyggtaygggtagataaygygagttaggagtattatayggygtttattaaygtgayggtgtaggagttyggtygyggygtttygtttaygtttygtatygatygygggygttaygggtttgatttttttaaggtygaggttygyggttaggtgttggygtygttgtttttttayggaggtgagtgtyggttygggggyggygggyggtggtygttgtatttygygtaggyggygggattagggttttyggtttyggttttggttttggttttttygygttgttyggtygatagttttagttagggtygaggttttygtygtggatagttyggtttgttttygt

SEQ ID NO: 11365 - DNA, 301 bp, Artificial Sequence
  Description of Artificial Sequence: Synthetic polynucleotide
ygggaagtagtaggygtayggtygtttggatttttttggaggtgatggtygagygtttgttgtaatgygttaggygggaagtttygtyggygatgygttygaagatgtygttgataaaggaatttatgatttttatggttttagaggagatgtyggtgtyggggtggatttgttttagtattttgtataygtatayggagtagttttttttgyggttgygtttgygttttttgtygttttttttttgygttttggttayggtttttttggagttttttttyggggygggagyggatttygt

SEQ ID NO: 11366 - DNA, 1395 bp, Artificial Sequence
  Description of Artificial Sequence: Synthetic polynucleotide
yggttttgtgaggtttaygygggagygyggaggtttttgggttttagggygtyggtagatggtttgtagygtatygttyggttttygygttggttaygttygttagygttatttttttttttygttttttatttttaaaaattyggyggtygagtagtttygtatttyggagggttttyggtgtaaaattgagtgggaaagagaaaggggyggagagygaygagagagggaaggtggggaagaagagttyggtygttttyggtttttttyggygagttttgagtttttagggtttattygtttttttaagtygaattatagaaattttttattgttatgttaatgaygagaggggttgtggggagagggtttygaagatttttttggaagaagggaagtttttttttttgttttygttttttttaygtttattygagttttttttagttagttttttgygtttttttttttttatttygagtttgaagagtyggtggtttagtttygttttttattayggttttatgygttttttatagttttayggttttttagtttagttttagaatagaggaggtggtttgggaattyggggygyggtgttagtyggatttttygtttttyggttgggygygttgygggttgggtyggygtatttgyggttattyggygagttttggtttattgattttygtttygagagagtygggagtttttttttttttttatttttygttagtttattttttattgaayggtggggagggggygggagygggggaygttttttagtttttatttttyggaggtttggyggggygggtagyggagtygggygygygtagaaygtagtttttgttttttttygttttagtattttaaatyggtttttgtagtygtygtagtagttgtygtygtttaggttgtttgggggggygattgygygttatttagayggyggagygtyggggatttaaatgttattaaaayggtgatttattattgyggaagtyggtaaatttttgtaggaggtttagttattggttgatatygttaygtgttttttttttagygtttttygttttttygtttttttttttgygtattgtatatttatattatttttttttttyggttttatggaggaagtgagaaagttggtatagttaygtygggtttygtaggattaggttatttagtgatagatggataatgtaagaatgaatttttttttggaatattttatatttagtagtggygattyggggatttgtttagttygagtttatttttyggattataggattataattttttagtygtgygyggttagygttaatagttgyggyggygaygatygttttttagtgggtaggggggtgtagatyggttygt

SEQ ID NO: 11367 - DNA, 766 bp, Artificial Sequence
  Description of Artificial Sequence: Synthetic polynucleotide
ygatttygttttatgtyggtygtatygtgttttttttaggttttattagtatttgggttgttatggtgagattaagatgggtttygtttataattaaygatgttatttygtagygagttaaagttattttttattttgggttygttaygygatttttgtyggttttygttttaygyggttttagtayggygttaaggtttygtttataaatyggtttygttttttygtgttygggttygtygtttattagaygtygtttyggygtagygagttgagggtaygtttatttttttttygggtttttagtttttaaggttttagtataatgttttaggaggaagattttaggttttttttttattygaygttgtttttgggygagtygaggtttygtttattygtyggttyggttttygtttttatttgaygttgtttttgtgtagygagtttaggttygygttygtagtygtgttattttyggagttygtttttttgtttaggttttggaagygttygygggtygttaagttaygttgygagttttgtttaggaaygtttagtygttygtygaagtttagtattttygyggyggygttataggtgaatagtatygggaagtagtygtggttttgygyggagggygggggttattggagygtygyggaggggaaatygaggtyggagggaaggttaggygggygtttggtygttygggaggtagatgttagtttaaggatatagaygggttatagygagggaggttyga

SEQ ID NO: 11368 - DNA, 691 bp, Artificial Sequence
  Description of Artificial Sequence: Synthetic polynucleotide
yggygattagttttygtagaggyggggttygagtttttagttagagttttaataagtagtygaagaaygygggtagaggtttygatatggttaggagagtaygtygtygttygtaggtgttygggtttygtygagatygggaagaggtggygtygttagttttttttagatttaggggtggttygataggtttaatttygtttttygttttgttttttygttttttttttyggygaygttyggttygyggttggtyggttygtygygygtttygggaygagggygggaggygagygygttggtygtygygtatttattattgttaaygtygtygtygygttttttttattttatttttttttttttaggagaatttttagtttyggtttttttygtttyggygtttygttaygtgatttygggtygttttttataygtgatygtttttttttttttttttattttygtattygttttttttttagttttttgtttygttttgttggtygttaggtatttyggggagaggtygtttggaggyggggttttaggttttatttttyggagggtggagaggggygggtaaattaygtygagtgggyggggtttgaatagaggygggttygygggttttttttygtygttttttyggttatyggaygagyggtttygtgttyggtttttttatygt

SEQ ID NO: 11369 - DNA, 1024 bp, Artificial Sequence
  Description of Artificial Sequence: Synthetic polynucleotide
ygygtatttattttgggttgtggagtttagttggtygtygttygtttyggttaygygttgyggttttaygggttygggagygagggtttygttygygtyggatatgggtygtttygtygagttygygtygygtygttgtygtttagttygtygttyggtagggygtayggaggaagggttgtgaggtgttgggtgtagggaattgattgtttttggyggaaaaatatataaaattaaaaaaaaaaatgtttttagagaagagtatattatttttgygggaygttttttttttttttattttttttttttaaattttatttyggggaagttttgatttgaaatttgygaagaaaattgttatagygtaagttgatagyggyggggttttaggggttygaggtggatttagyggggaggggttggaaagagagatygggtttgggagaatttyggggatggggattaaattttttttttttttygttyggagattattatttattttygtattttttygtagtygttttaagtttttttttttttttttttttttttttttgtttyggaaagttagygagttttyggtagyggtygtattttygtttyggtggtttgaygayggyggyggtygtttttgygygttttttygttttttttyggtttagtttagaygtygtagtggyggtaattgyggtagyggtggyggttttgatttygygtatttygttttttttttttagttagtttattttagtyggtttttttgygagggggttttttttttttttgtttttttttttttttttttatttttataattttgaaatatttttttttttgttgtttttttttattatattyggatygggaaggtttygaatttttggttagyggtttygatgttgggagyggygygattygggttyggtygygygatttttygygttttgygttgtttgggttaggaggttagagtyggtttgggttggttygggttttttattygggygttgygttttttygg

SEQ ID NO: 11370 - DNA, 1339 bp, Artificial Sequence
  Description of Artificial Sequence: Synthetic polynucleotide
ygtygygggttttggygagtaggtgattayggatttttggtgtttgttgggygagayggtgaagtaatttttttttygttttttttttygtttagaaaggtgtaagattygttaaatygtgygttgtatagyggyggtyggagtagaygygggatggtygygygttttttgtatagtatagaggggtagtyggagagtttgggaaaggtaygagyggggaattagagtatagggtgyggattagaaagagtagayggttagtygggyggggaaggaagttgtygagttgtaggtgtggaaggggttgttttaggtttatttttggtagaygagggggyggggagtygygtyggggaygaggagattgyggatygggygygttttttgygtagtygttygttygygtgtttaagtttttygggaatggttttygtttaggggtttagttygtygtygttagtttygtagagtttgtagttgttggggttyggtagtygttagggggygggagttgygtygygaataatggtygygtttggtygygggttggygggaggyggagtggaggtagagtyggtgtygggygygygygtyggtygggygtgttggggygygggagyggttgygtaggygggggygygyggygygagygygggagggygyggygggagygtyggggaggygggyggaggygggyggaggyggggggyggggagttygaggggtggaagtyggyggyggtygagyggggttagttttttgtagtgtttgttaatgttggagtygtttgtaaagtgttttyggtaagaaggtaaatatttttatygggggygttygggagatttygattttygygtygtyggygaagaaggtagagggygttggggagttttgtagtttygtagtayggggaattyggagaaaagtagtttttttygyggttttttttttttygygtttttttttttatatygggttttyggggtagtagyggggaggggagatyggygggggagggaggatagggaggygaaggaattggggtggggggtgygtgtgtggtggagggggtgggaygatataggtgttttgaggggaggagtygggaggaaggygaggaggtygggttaagtgggggtgyggaggtyggggagataggaaygyggttgygggygygggaggttggggttttagggggtyggggtggtagyggtyggaagagaggayggygagtgtagttayggtgtggttgygagggagagggagygtttagagtagggtaggggagggyggttyggggagggtttgygggaaatgggtttgggggygttggaggygg

SEQ ID NO: 11371 - DNA, 2273 bp, Artificial Sequence
  Description of Artificial Sequence: Synthetic polynucleotide
yggtttttagggatygaggggttygtagagtgatttattttattttygggaagttgtygggagtttygyggattygtygyggtttttagtttttatgtgtaggggtttyggggttggggtttggttagtgygaygtttygttygyggttatttatagttgttgaggaatagtagtatygygaagtygagygtggyggtggttagtaggattaggtaggygttgtagggtattatgaagtttygtattagtagggaggygttaggyggttgtygggtgtttygygttagyggtagyggaggtatggttyggggtttyggttttgygttttatttttagagygtgggggttttttayggggtgtttttgggtttttttagggttgttygttttattttgggatttttggggyggyggatagtagttgtgtttttagagtttatttagttatagttttgggggtgttaggtttyggttttagttttttaggtttatygtgggaggagggtagaattttttyggagtagaaattttaaatgtgggtttygaggtaggyggaggagggattgggagttygtagttatttttgttgtttatagttttttygggttggtygttagygttyggttttttyggagttttyggagtygygtaggtyggagaggyggtgygygyggtaggtgygygggggtygggygtygagggtttgttgttttygttttyggtagaggyggaagyggygataggagygggtaggtaggaggggyggtygygtygggagygagaagaaagygtygtttgyggaggtygygtygggtttygggttttttttagtttttttygttttygyggggttggggaggtgagtgaggggygaagaygtygyggagggagggygggagtagagataaaggaagtygtttttagggatttyggygttygyggggagttttagaggatygggyggatgyggaygggagagygtygtataaaagggaaygtygggtaggyggggtygggggtgtttggttggggttggggttggggttgggttyggggtygggagygttggggttggggttgggtygggattggggttggggtggttgaggttggggtygagggtgggtttgaaggtgttgggattgggggtgggattggggttgggtttgggggygttgaggttgaagttggggtygggggtgggattgggggygttggggttgggtygggggtgggattgaggttgygggygtttaattgggattgagtygagggtagyggtggggttgggtygggggagtaggggtygygtygggtagygtygygtgttggagyggaggygggtgyggtyggggtaggtygygggaggaggaagygtttggggagtaggagttgggtygggygggttygygtttygtattygygggggtgaatyggagtygtygtagggggttyggggggtygygtgygatygygtgtgygygtygtygtgygtgtgttygygagtgtttgygttygyggtttygttttggyggggygtaggtgggggagggttttaggtgyggygygagttggagggtggagtgaggtgagyggtttagaaatygtttygtttatttttttttggggattgatagtggtttttttagtygtyggygttttygattttygygyggggyggggttatgtaaatgagttttatgtaaattgyggyggggattttttgygggttygtggggttggaaygtttttaagaggtygtttygggaaygttygggttttgaygttattgyggttyggggyggggaatgggggtttgggtttatttgggatttttgaygygtagttyggygtttttatattygttttygtaggtygtttttttttttggtygttgtttagtygggggattygggggtaagggaggggttygttyggttyggtgtgtgtattattttttagagtttatgttaggttygattattttggaggttagaatttttyggygatygtattttagygttttygtatatttttggttattygtagtttttggaagggatttttgygtatttattattttgtttttttttttgtttttgtaatgatygattttattttttaagttttagttttaggaaagtaaggattyggygttagggygtttttgtttygttagttttttttagtatygyggattaagttatttgttatattyggttttatttattttgtagaygatagttgtyggtagttattagtgttatygygt

SEQ ID NO: 11372 - DNA, 5586 bp, Artificial Sequence
  Description of Artificial Sequence: Synthetic polynucleotide
ygggtttagtttygtatayggattygttaggagtaggtggttagtaygygttgttggyggygtattaygtaggtgtaggtgtttttattgayggygttggygatgatgtttaggtgygtttygtttagggttaggtagtyggggtaggagaattttaggggtttttggtttttgtattagttgtaggggggyggggygttttttgtaggtatagtttttttygttgtttgtttygtatttttgttttaaggtygttygygggttgtttatttygaggatygttyggggygtttatttattatatttttttttttttgtggaggattttttggtygtagyggaaggttaygtttttgttttygggtattagtttggttttggttttggggggyggtggggtggtggttatygtggggaaggggaattttgtttygggtgggggaaagagtttygttagtgtttttttagtttygattatggttaaggtttagtttttaygtagttttgtttyggtttygtgggtattatygtagtagaagtygtagttgttggggtagagtttttttatgagtygtyggygagygtygtagaagttttttygygtttaggaygygtataygaatagtttgtygaggtattttgtygggagygtggggagtayggtttggtttaggatygttyggttttygttttttygttygataaagggatttatygtagagtyggtgtagtttttatagttygttttgggataaygttttttagtygygtagygtggygtttaggtgtatgagygttyggtygtgttgtgagtgtattaggtttagygygtggtygatttygtgggtygttaygtgtattaggttygtgagttataygtttgygggtttygggggttagygtttgggagtttygggtttagtttygtygttygtgggttagtttttygaggttyggtgtatttgttggagygtagtygyggagtygttttyggtygtagttayggaaagataagaatgttttgggtttaggyggtgagttyggtttttaggaatgtagttttagttttygttttagaggygtagggggatgggaaagggagtttagggttgtygggatgggggtttttaygggtttttttttttgtttgttagattttagtggtagttattatttyggaaggttttttttgtygtttgttttaaagttygatygyggtagtttattgtgttgtagaggagaggtttttaggaggttagtttggayggttattttttttttagttgtagygygtggggtttaggatttagtattygttgtygtygaagtggatgtygtygtgyggggggaagaaggygtgggttagttttttygtggggtygtygaagtagtggtgtagygyggagattaggtagttygtgtggttgatygggtagaagtttggggggagtayggggttgagaggtygggygygtagggtygggtyggggygggggygggygtttatttattyggaggtygttgggttgttygggggttatttygyggaagttgaagggggataygtygttttatatgyggaaggyggtagttagggttygtygygtttttygygggtttagtaggtttygygggaaggagaggattttgtagggagagtgagtttagygggygtyggtygygttttttttttyggggtttagttagggygtatttgtaggtgaggttgaagtggttttagygtagtttggttggagttagygtgtagyggygtttgyggggggttagtgggttygggattygggtgggggggatygtygagaggtttagygtagygaygtttttttttagggaagaaagygtgygtgggaggtatyggtgayggtttttaggattaaaaattgtygyggaaaatggattggaaggaaaygggggtgggggtgtttagggttgggagygggygtggygggttttgtttgtttgtggtttygggttttttaatttgagygttttgttgtaygtttttgggaaygyggtttagtggaggggaaggggttgaatagtagggygaggttttttattttttttaataattggatataggggygtttaatttttygatttygggaygtatattyggatttttaaatatttygtatatttygtataygttttgygggtttttygatagattagatttatagaygtgaggatttttttaattyggtatttggtttttttttygtygtttatttgygttgygttttaggtyggtatygtyggggtttttagtygggttagtagtattagygyggggaggaggtatagggygattagygyggttttaagttagyggygttygaygtttgttttyggggttttygaggggataygggtttygyggtttatggtagatttgttgtggggtttagggttgtatggggtagtaaggygygggggttygggtygtagagttttyggggaggattyggaggggaggtagtggttyggyggttygggttatagttyggtgtggtgggggggagggagayggggygggagagggggtaaggttgtttttgaagggaattagttggttygttygttggtygagttgtttgttgtttttagtygggggtatggggattygygtttygtgggttaggggtagaggtttgggtatggtttgttgggyggggttttyggaggggggagygaagagggttttaggtagttygggaagggtagygttagggttttygtttaggaaagggtagtagtgggggtttttaagtttttattgttgggtagtgagtgatttggtggttttttttttaaatggaatttttaaaaaatttttgagttttatatgagyggagtttttattttggtttaggtagttgagttgggtygtaggagaygygtygttygtttgatagtgttttygagagttgggaggggatggtyggatggggaygtggtagtgagtatggggyggtggagggggaggyggggagggggtgygtgggtaggtaagggtygyggagggtgttaggttgyggggyggagggagggaatttgttagggtttttyggggagtygggaaggggygggttttggttgygggaagtttygtggagggtagygygtgaggtggagggtgtgtggtttttaaattttyggttaggttttagtaaaggggagagggagaygggagggaygggaaayggagttaagygtygggtttggaggtttggatyggttttgattgggggygggggyggggagttyggagatttaaaggttygayggggyggtyggygtttaggygygagyggttttgggttgggatygagatygggtatyggygtttygyggggygggggtgggggattgggtagaggagtaggagatttygagttagatyggtttgtgtttgtttygttttttttygtttttygygtyggygtygggtttagggtgayggtagttyggttaayggggttagygttaagtagttggyggyggtygygggyggtttttggaaagygygagaggttgggtttggtygtygtatttgtttygatatygtttttygtttttttagttygttatttygtttgygtgygttyggtttttagattttgtttgggaygttttttaattaattttttgttgggaygggattttatagttttggggagtgtygggttttttggattagagygygagttttygyggtygtttttaggayggaagagygaggggggttygggggtagatataggagttttygtttygtyggattygggtttggggggygggaggyggtygtgttygygtttgaagggtgttttggttygaaggtygtagttygggygggagtttggattygagagtttggggygggyggggyggatttagggaagggtttttttttttygtttttaggttygttygygtgtttygaggggaggattttagaggygttyggttttttaggtagatagtagaggtaaygttygagaatttttttttttataaaatatagggygggggtaygygaaggtagttygggygyggyggayggygyggtttataygaagatttggatgyggtygyggatgggttggyggtagatggggtaggygttgagygyggagtygtagggggygtatgygtygtggtygtattggaataygaggyggatgtggttgtygatgtagatggggtaggtgatgygtttttttatttgtyggtagyggttttgtagtttttttattagttggygyggygggtygggggygggggyggygttygttattttagagtygtttgyggggtgggggaygggtgtgagttgggaggtygggtgggggaatgyggggagtagggagttgygggggggygaggttgggggyggggtgttatttgggaygggttgtgatttgtaaggggggttggyggggtgggtgatttggaggtagaggtggggttygggtgygggtaggaggtgagtygtggaaattaggtataaggtggtgtgygggttggagttagggttgtaggtgggttgtgagttgggtyggggtgtgatgggggggyggtgttttgggtgggttgtgatttggggtggggttatggagggagtgtgatttgggaggggtygtgaaatttagyggggttggggtgtgatgggggaggagggtgttattttgaggyggggttgtgggtygggtgtgatttggagtaggtggggttgggggttgggggttggggggtygggtgtgagttttgggagggyggggtgtaatttggggaagggttatgggyggaagtgtgggagggaaggggtgggggayggggattygygggttattagttgagtaggaggygtgttgggggygtagagttttatttatttgggygtagttttttgttgaygattatttggtatttgatgtatttttttattttgygygygtattttgygaagaggagagygyggttggttgyggttttattagtygggtttttttatttyggggttttttatttatttttatatayggtgyggtgttggtayggygagaatagtattagtagygttagttyggagtatattaggtatttagyggtttygggtttyggygyggygtttaygtgtaggttygttayggtgttgggggtttygagygtttgtttggggttyggggtygygttttygttygtttgtygttttttgtagggggaggaggyggtttgagaggggttyggaggtygtyggattttattttygtygtttayggatttatyggaagygttgggygtagttttgaagggttttgagtaygygattttyggyggttaggtttagygggtttygatygyggtggttggtgtagtttaygtyggygttttttagygttaggaagtaggygatygtygygtttatygttagtttygygttgtyggggaggttygaggtttgtagttgggyggtaggatagaygtyggtgagggygggygtyggggtaggttygagggaggygttttttggtatttggtagttttagtagtyggygt

SEQ ID NO: 11373 - DNA, 1264 bp, Artificial Sequence
  Description of Artificial Sequence: Synthetic polynucleotide
ygygggtgaatygagygttttttygtttttttggtttgtagttagagatagtttttygtygttygatttygtattygttgaggagygtagggttgtgttygtatttygtttygtatttgtttgtttagggaaatygggagtttygygggtttygtygygggaaggaggyggtattgggttttaaaaattygtgttgaggagaagtygagygttttaatatattygtygtyggtygggtygggttttygygygtttygaygtygttttagtttygttygygygygttygataygttygttttygttttygttttgatatagatataygygygygttttygtattattttagaagtttattyggttygygygygtatttagataygygtggtttatattygtygtataygtttttygtataaataygygygttttttaygttttyggttattttagatatayggtttygggttttaygtaggttygggygtygatatattttygyggtatggataygygtgttttttatttatttttyggttaaaygtatttttttttgtagttttttatttttgttttttatatttattttttattttygttttagaaataygttttttatatygggttygtyggatttttatattttttattygygttagaaaygygygtattttygtggtttttttttgtygygygtaaataygttyggttygygtaygttttttyggtttggtttygtatattygygttagaaataygygtggtygygtattaygttttyggttygygagtaygygtgtttttaygtttyggtttygttttygtttygygygygttttygttggtygtygttttygatygtaygygtttttygtttagtttygygtygtygygtatttattyggatttgttgagttyggtttttgttygttaggtttgygtygagtygtygtttattggttttygygtttygttyggtttygttyggttyggtttagttyggtttygygttygtttagttttattygtygtagttggaaygattygyggggtttygggtatygyggttttttygttattgttygagtgygtygttyggattaatggyggggygyggyggtgagtttatyggattagatttygttttttaggtygygtggtttaatyggaggatgygaygttattyggagtygggtagaggttggtgyggggygyggagtygttyggygyggggattgygtyggaattgygttygagtygygt

SEQ ID NO: 11374 - DNA, 716 bp, Artificial Sequence
  Description of Artificial Sequence: Synthetic polynucleotide
ygaygggygygtgaggtttagagaggagtagtttygggattygtttttttttttgtttgattttggttaggaaaaggggtttggagygttttygggtttyggaaaygygggatttttygtaggtagtygagtagggyggtygtyggggttatygttgggygtygtyggagttttaattygatttatgtgygggatttyggttttttgtgygggagttttygttttgygygtygggttttyggttttygttttygggttgggattyggtttttygtyggttttattgagttttygtttyggatttgtygatttttygatttyggggagagagattaagagattgggaygtaaagggygtgaggatygtattttttattygtaggtttttttaggggygtygygtygggggtttyggttggygatygagtaggtttyggtygagtattgtyggygttgttatttgtgtgtatyggggatagggayggagggaygygatttttatttattyggttygtttatttgggtygttygygtttyggyggtttygattygaygttygagttagyggagttyggagtygttgggtttttygtttttttygttygttygtttttttygttttttyggtttttttygtttygtygttttgygtygttttattataaaaggtgaggttyggggggagggggygygggattttygtttygyggaagygg

SEQ ID NO: 11375 - DNA, 619 bp, Artificial Sequence
  Description of Artificial Sequence: Synthetic polynucleotide
yggtggatygtttgggygggtaaaygtttttttaygttggygggtaggatttgaattygggtttttagggttttgtaggtygttattgttttygttttttttttgttttyggtttttttygtttggtttgtygyggttygtygttttttttttttttttttttttygttygttttttgttttttgtttttttttttygtttttttttattttttgtttttygygatttttttttttttttygatttttyggygtygttttttttttttttttgttttygtagtttaaataygygatatttggagtaatagtagtygttyggyggtttgggttttattataggtyggtttttatygyggygtgtattatattattttattttaaagaattygtagagaaattygtttyggtygataatagaaagtaaaaatatagttgatttttattagggtttttttataggtttygygtgaggtaatgaaatatggaagyggtgagatatgtaatgttttattaagyggttttagttataayggygtgtatgttaattaygtttgtaggttatygttygttttyggttgtyggattatttagygygttttttttygagtttyggaygg

SEQ ID NO: 11376 - DNA, 293 bp, Artificial Sequence
  Description of Artificial Sequence: Synthetic polynucleotide
ygttttayggggtaaatttygaggtttagtttygygtgggagtygtagyggggygggttygttttgggttgggygggtttttttagygtagygttgggggttgygggttttttagtagtyggagtagtattttgagtttyggttgttggagygttgggatttttggttgtygttttygtagtagtagtaattattatttygttgtyggyggygtttttttgggaagtagtagtaattggtggagttggagtygtagtagtttgagtygtygtagtagtttttgtyggagtygt

SEQ ID NO: 11377 - DNA, 2748 bp, Artificial Sequence
  Description of Artificial Sequence: Synthetic polynucleotide
ygaatyggtttttttyggtttygtattttttagggtygttyggygagtttttgtatgttttttattygttaagttygttattyggtttygtttttttataygygtattggtaygtttttttttagtttttagygggygggtagtttgtygggtatttaggaagttygggtttttyggygtyggaggatttataatttagttatygtaataagttygygtagttaaagtagttygtttgggtattaggttttatygtttttgtttygtggttttaagagggttygtgttagttttygaggtatggtygtttggygttyggtatattttagatttatttttttttgagggtaggggtttttyggggagagaaagagtagtttyggggttygtttygggtttttttgtatagattttttaggtayggagaataatggaatagttttgygygttttttttattygagtaagttttgttttttttttttygtttgttyggtttttattagttatagggtaaaggtttttyggttaaataggagtttyggygttaaygtttagagttttygataygttttaaaagatttgygggtgtaggggttggggttagagtyggggttgaggtatyggatatgygtttagatgygtatagttggtagttygttygttttyggttttagaygttttttttagttagaatttttatatygyggggaaattygatttgygtttttattygggatttatagaggaagtggagttttagttgtgtttyggggttaattagtttttatatttgtttttttatatttgttttttagattygggttttygttggaygttttttttgtaatgygggatgtttttgttaagygtaggttatattataayggaggtttttattagttttaggttttgttatattgggattttggttttatttttgagagtttgtaatttttttattttttattttattgtttagttttatttygggtaggttagagtygagttygggttttygtttgtaatgtttttaagaaggtatatttgagttatgygtatttggaggtgggttagtttagtatatttgggygtaatgtttattatagtttgatygtgaataggagggtttttygggaaggygtaaggggagggggtttygttttttttatattttttttagtagttggttaggagaaagttaggggyggggyggggyggggyggtaggatttatttagtatttggttgaagagtagttgttttaggttttttagtayggttattattagttyggggtttattttgaggaaggygygttttttttggtttttggtagaggggataggtttagagtttttttgygttttggttttgttggagagtagttygtygttygatttgttattttygtttayggtygttttaggygttttgttgagyggtttgattttygtatagggttttygagggattyggttyggtttttttaggttgggygygagyggagttaggggggttttggygtygttygtygggttgtttttggtttggaagagygagtgtttygatttggatagygttttggatattagyggagttttayggtttttggattttattttgtttaagtttttgggygttttggttatatygtygttttattygggtttataaagttgtagttttttttyggagttygtgagaaaagagaggttggtgagtgatttttgtttgygtaggttggaggygggyggttygtyggggatayggttgtttaygttgtyggatttgaagatttttagtttagtygygttggttttggttatgtygtygtygtygtygggygttttggygygtttgggtagtatgtttttgtygttygtygttgtygtttttttgtyggygtttygyggttygttygygttttygtygtygtygtygttgtttagttttatttygggttgtaygtttttgaygttgttgtttagtattttgttygygaggagygtatggaygattygygygtttgtaggtayggggggagggggtagggggygggagygtaggaggaggaggygggggaggaggagggggagagagaggayggaagaaatygaggaagaaggggagagaagggggagagagygagggaggagggagagaggtaagtygagggygtaggggaaagaaaygygaggaaggaagtygggaaaaaggaaagagtagggaagtyggggagygatagggyggggtyggaggaaaaggggyggggyggyggggaaaatataaattaaaatttaaaaattagttaaaggaaggatggaagtttygyggttttttyggygtttagyggtgtttttgttttggtgttyggattttagttygyggtttgtttgtttgttagtttygtggatatygtattgtygggtagygtttyggtygtatttagttagttagttagttygagtygaggttgtaggttgtagtttygagtagaggaaggagggaaggggaaggyggggagtaaataggaggaggggagygagtgtgygtayggggagggaggtgggggagagatagtgtgtttatttttggttygggagggggaggtatttgygagyggagttttaggggyggatgagtggggggtagggggaaataaaggaaaagtagttttttttttagtttttygygtagaagyggggygggtttttggattttyggagggtayggggattttttgtygt

SEQ ID NO: 11378 - DNA, 433 bp, Artificial Sequence
  Description of Artificial Sequence: Synthetic polynucleotide
ygggattgggygttagttagtagttygtaggattaggyggggataggygggtagtatttataggtaagtygttagggggtttaggtttttyggaayggyggatagttygagtttagagtagtyggtagatagtatgatgtygtttttttggtagtggtagggggtygggtaggyggtgggtttygggtygggttggggggygtygtyggtttttygggaagygtatagygyggygtaaagttatagygttyggagtttyggygggttgggtatttyggyggtygggttattggggtatttggyggtygggygyggaygtayggygygatggtygtagttgttttttttyggtttyggygggttgtatygtyggtggggatygttttaggggttttattgggyggyggyggyggyggtgggagygtygggaygg

SEQ ID NO: 11379 - DNA, 1376 bp, Artificial Sequence
  Description of Artificial Sequence: Synthetic polynucleotide
ygygggatttttatttttgygaggtttttagagtttttttgggaggaggttttygttggaaygtgtttgggtgaggagagggagatyggtttttaggtagggayggttagggtgygygtattttagtttttgggttatttyggygggagtttgygttttttttaggygygatttttaggaaggtttygggtggtgatygtagattggagagtgagttgggttggggaaagagtgaggyggatygtttttaattttyggtaaagtgtgygttttygttttattatttaggggyggyggtttttgatgagtttatgggggyggggygttaggagtttygttygygagtttttttttygttttygygaagtagtagttyggaattygyggttagggattygygtaggtttttttttagttgaggggyggtygggtattygggtttygattygygattatygtatttattattattatagygggaattgttyggyggtttttagaagtttyggttyggtygtagaggtgggttttygagtatagaggtttygaaattyggttygtagtttttagttttaatgtyggggggygyggtggtttygggygattttttatttygtttttggagtttataggtggttttataatttygyggttygygttgygttygyggggtttagtaygttgtygygggatttgtttaaygtggagtgtgtgtttgttttttttygtttyggttttyggygtagtttttatttagaagaygaaattgaagaygaagagtaggtatttgatgtatttggtgtagttttttatttttatggyggygygggyggygggyggtttgyggggygygggtyggttttgggyggygggygggtyggygyggggtttggygggtggtyggtaagggggtttggygggtygaggggygggggygygaagaaaggggygygggggygygggggygygggggygygtggggygttgggygtyggaggtttggtaggatgygyggtggggtygtygtygtygtygtygttgygygttygttttttggtygggygygygtttygtttygtagtatttatagggygtygyggtttygtttttttataggtttygtttyggttagtttaygtttygttttyggtttygttttttgtygttagggygygtagtygaggggtatggggtygttgtatttatttttaatttggygygtttyggttaggattttagggtttaggtgtatygtgttgggygygggaggygtttttaagttgttgtygygtttygagtttttaagggggtggtagtagggtygygtttgaggataggtatgtagygtttgtttaggagtgtagtttyggtgtygg

SEQ ID NO: 11380 - DNA, 3393 bp, Artificial Sequence
  Description of Artificial Sequence: Synthetic polynucleotide
ygtagyggaggygggaggagagtttttggygggtatttgtttttygygtttttygygygtttaaggttgggtttyggggtattttattygggtygtttygggtttagttttagtttagaatgattttatattttttatatttttaagttttagaaattatygttttgagaattttaaggaggatattttttttygggttttttgtagygtygagtttyggtaggttttttyggygttygtttgttgygagatttttttgtygtttygaggagtaygagattttagtygtttgtagattatttatatttgyggagggtggtagtaggggtttggttggtttgaaaygygtyggggaggygygygttgtattaaatttygtttttgtttttaagggtagattyggggtaaggggattaagattttygaygtatttagygttatggggatagttatggttaatattttgtttttgyggttaattttaaggttattaaaattttttattygtagagagygygtatagtagtgyggatattyggggattgttttaaggaaggttgagttttgggagygygtggatttygttttatygttyggygattggttygyggggttgggggyggagatygagttygygttgtataaatatttatgagtyggtagygyggygygagyggggttggagtygggaagttgggttaagggygttgttttygtygaggaggaggyggyggttgggygygggtygygttatttaggtgttygtttygtttttyggtttggatttgtttttgggtgtttagtaggaaggagattgtgtgtatttygttygattgyggtyggagygyggygttgatttttttaggyggygggggttygtttgtttyggyggyggayggaygaaggayggaygtyggagaaagagggyggyggtttgggtygaggygggtttttaatttyggyggyggyggyggyggtttggttttgggggygggtatgagttttygggggtygagtggtggtygttagggttgattyggygyggtaagyggttyggtttagttattttgattgygtatygyggttttagaggaaatttgyggygttttygttttttttgttyggyggagttatygtygttyggygyggyggggagaagtggtygggygygyggagaggaggygagygagygygggaygatgagtygaggttyggtygttttgygtygygagggttgagygygattyggggttagtagagyggatttayggattgtggygygygtttgtagtygtttttaaattttyggagyggyggaaaggagtgyggaagggttttgtttaggttgygggtygygtygttgyggaygygtttttagaaggggttagattatyggtagatttttttttygggygaagtataagggagattttagattattygttgtattygtttgyggttttttygtgggtttttttttyggtatttttttgygygtygtttggagggygagggtatygggtygaggygtatagtatggagtggggttatttgttggaagtgatttygttgttggtygttttggygttgttgtagygttttagyggygttgyggtygtttyggttaaggagttggtatgttaagagattatygtgtygttgtgtaagggtatyggttataattatatttatatgtttaattagtttaattaygataygtaagaygaggygggtttggaggtgtattagttttggtygttggtggagatttagtgttygttygattttaagttttttttgtgtagtatgtataygtttatttgtttagaggattataagaagtygttgtygttttgtygttyggtgtgygagygygttaaggtyggttgygygtygtttatgygttagtayggtttygtttggttygatygtatgygttgygatyggttgttygagtaaggtaattttgataygttgtgtatggattataatygtatygatttaattatygtygygtttagttygtygygtygtttgtygtygtygtygttyggygagtagtygttttygggtagyggttayggtygttygtygggggttaggttttygtattgyggyggyggtaggggyggtggyggyggggaygyggyggygtttttagttygyggyggyggyggtggygggaaggygyggttttttggyggyggygyggttttttgygagttygggtgttagtgtygygygtttatggtgagygtgtttagygagygttattygttttataatygygttaagataggttagatygttaattgygygttgttttgttataattttttttttagttaggaygagygygtttttatygttttttggatyggtttgtggtyggtgttttgtttygtgtttattttygttatygtttttattttttttatygatatggagygttttaagtattyggagyggtttattatttttttttyggtttgttattttttygtgtyggtgggttatttagtgygtttggtggygggttaygagaaggtggygtgtagyggtggygygtygggygyggggggygttgggggygygggyggygyggyggygggygygggygyggygggygygggygygggyggttygggygggygyggygagtaygaggagttgggygyggtggagtagtaygtgygttaygagattatyggtttygygttgtgtatygtggtttttttgttggtttattttttyggtatggttagttttatttggtgggtgattttgtygtttatatggtttttggyggtyggtatgaagtggggtaaygaagttatygtyggttattygtagtatttttatttggtygygtggtttgtgtttagygttaagtttatygyggtgttggygtttagttyggtggayggygattyggtggygggtatttgttaygtgggtaattagagtttggataatttgygyggtttygtgttggygtygttggttatttatttttttatyggtattatgtttttgttggtyggtttygtgtttttttttygtattygttyggttattaagtaataggayggttttattaagaygtataagttggagaagttgatgattygtttgggtttgtttatygtgttttatatygtgttygtygyggtggtggtygtttgttttttttaygagtagtataatygttygygttgggaggttaygtataattgttygtgtttgygggatttgtagttygattaggtaygtaggttygattaygtygtttttatgtttaagtattttatgtgtttagtggtgggtattatttygggygtgtgggtttggttyggtaagaygttggagttttggygttttttgtgtattygt

SEQ ID NO: 11381 - DNA, 1381 bp, Artificial Sequence
  Description of Artificial Sequence: Synthetic polynucleotide
ygttttaaygtgttgttttggtattaggaygygtatggggaggtggagataaayggtgygtggggttygygtgggygygaggaggggtygttayggtttttttgagagtgygttgttgagttyggttttggaggygtgyggyggggaggggttagttttygggtgttttgtgyggttyggttggggttaaagttyggggygggtttgtttttgtgtaygtgggagatggttaggggtgttggggatttygagggttggtgtgaggtttygggagttatyggggtgattggtygtygttygtagaygggaagttttaygaygtttaygttttttatagygattgtttygaggatygtaagttygtgaattttattttaaagtygtagttggagyggygtyggggttataagttttttttggaygatygygattttttgtygygygttggtatttygggttttatttygtgtttygtttattyggagggttygtttygtttygttttatgtttygttttattyggggttttatttttattatygagtttygtttttattttygtttattygaggtttygttttaaaaattygtttatttygtaggtttygttttttttttagagttttgygttyggtatygtttttgagttttyggtttygttttttttygttttygtttttgygtygtygaygttygttttttygtagagtttttygtygattttttggtgaatttgagtygttgtygaygttttatygtggtgttttyggaygtttttttgagtygggtttggtgtagttatagttttyggtgggtttygygyggggttgggtgggttttagygtagtatttatttttttgayggtttygtttygtagggagggtttgtgtyggttgttggagtttattygtagatttatttttattattttygagggttagaggygygatttygygtattyggygtttygtttgttgygttagtatygttatttggtgattttgttgttttggaggttyggtttygtggtgyggagtaggygygggagggttyggggttagyggygggttagagatgggyggtgttygggttttaggttgggattttttygtggggagttttgyggtattaygttttgtgaatgggttttggggggaggtttygttgtttggggtttygatgyggggagtygtttttgaggttttyggagttayggaatagttgtygtagggygtggaattygtgggtagtygtaggtgtgtttttgggggttaggaygttaggggttttygaggtgtttatatttgtaaatygtttygatttggtttttagattttttttttygatttttggaaagaagtgtagttggygttgtygygg

SEQ ID NO: 11382 - DNA, 493 bp, Artificial Sequence
  Description of Artificial Sequence: Synthetic polynucleotide
ygagttgtttttgggygygtttggggttgtatttgggttaygtgggygtygttgtgtagtyggtatttttyggttaatttygyggtttggagaaggggttttgtattygtygtygttgtttgttttygygyggttttygtttattgttttgyggttgttttgygggttgaaaagtttttttyggtgtagaatttygggtttagygatagtttgygtygagtgtgygtatttgtyggagattygttagttygtyggtygyggtgagtggtttttggagttattggtttagggygggttygygggatggggygggyggttyggggygtagtyggttaggtygttgttatggtaaygyggtggaaaaaygggtttttgggtatttygttgtyggtyggttggtaattttttagyggagggatygggtygagttygyggattttttygagtgttttttggggtttagtygttggtattttatttttttygggttygg

SEQ ID NO: 11383 - DNA, 922 bp, Artificial Sequence
  Description of Artificial Sequence: Synthetic polynucleotide
ygtgttttttttygttatttggtayggttygtgttttygtygttgatttggtaggttgygygygtatatttyggtygggtgygggtyggyggggtatagyggtttttayggttygttttygttagttatttttyggttttttttttygttgttygygtgtttygggtyggtttagtatttttygagttaygtgttygygtttttyggyggggaggagygtagtygygggggygygtttyggtgatttygttttttagttttttttttttgagttygggagttyggttygygyggttaggtgygaggagattygggattttaygttygttygttttgtttagygttttagtttyggygtgygaggygtygtttttttttttgttttgygyggtgtatggaggggttygttyggatygtagtygtygttatygtagtygtygtygygygygygyggggggatgatttgggggtggtttttygagtyggttgtagygtaggaggtttggaggtttagttagtttygyggagaggtgygggggtgggggtttygtygtagggtyggagggaggggtggygygygggtattgggtttggggggttttggtttaggggaygggaggtttyggggaygggygggtyggygttttttggagggygtgggggtgtagggttgygtgyggggtttggatgttgatgtttgttyggyggggagtttyggygtttygygttttygggggttyggaggtatttygygggaggaggyggggtgaggtgttagtgataygaygaaatttttttttgaygatggttttygggggtaggtgagatgtygtagagyggggagttagggygttygygygtttttttaagggagtygggtttttggttttttttaatttttatttttgtagagygttygyga

SEQ ID NO: 11384 - DNA, 719 bp, Artificial Sequence
  Description of Artificial Sequence: Synthetic polynucleotide
ygttygaggatgttggaggtgggggtygtygttttagttygggygtagggttgggggattgggggyggaaatttttygtagaattgtttygtttgtttattttaagggaayggagaggattyggtttttygygaaaatttggtttagggaaagggatttyggaaagtagtttygtagggttgtggtagttttatttygattygygttgygtttaygtgtagggttygatttttttygggaggygyggygtyggttggggttaggyggtygaggatttygyggtttttygtttygtttygtttygtgggttttygygtatygtygtygygtatttatttttaygggtggagyggggyggggtagtayggtttygygygtagtttygattygttaggygtatygatyggyggygtagygttggygygayggttygattyggtygggtttttgtttygggygygggttyggtttgggagygggygagttygtttgtaggggaggyggggattygggttygggttgggggyggggaaggggttggataygtttgygtatayggyggttygatttttaggagttttygggaggggtagaaagggyggggtggaggagggggaagggygggggtgatgtygygyggtygtaggtttgggatggtgttygygttttygagattyggatagaggtaagtaggggygtygtgggtgttagagaggygg

SEQ ID NO: 11385 - DNA, 958 bp, Artificial Sequence
  Description of Artificial Sequence: Synthetic polynucleotide
yggtgtayggggttatatagtyggaaatttttgtyggtttygggttattttttttttgaaayggtttttttyggagttattttttggaggattttatttygttyggtgttygggtttygtatttattttttttttttyggttygtttttygtayggygtttattttgtttttygttttttygttttatygtygttttgtttatattgtttttygtgggygttttyggtygtttttttttttygggtttyggtttgggggtgtttagttygttyggygtyggtttaaggtygygygatttygtaygttttygagattygtttygtygttygtygttygggtygtatttatygygttygtaggatttgggggttttygttttgttygygtttyggtatygtygtygtygtygtygttagyggaaatagggggyggggtttgttygggaatggygagtttgyggggyggggyggttygggggyggagyggggaggggyggggyggagyggggaggggyggggyggagaaggatygtagggttgagyggggygttagygttagtgttyggtattgtttygggttgggttttttgygttagaggaaggggagttyggggayggggtayggggttygygaggtaygggtgttttttyggggtttyggaagttttttttttygtttygtygttygtatgttyggatyggtygttttttygaggtgttatgatttygttttttttttgyggygaaygggttttttttyggggtaggggyggggaggttygggtttggtagtgygtttttttgggttttgygtttatayggtatttaagggtttttttggtttaggtttyggttttttttttygygttaggttgtttggtttygttattttatttttatatttaygaattttttttttggtgtttygggyggattgtgygagatgttgatagygygg

SEQ ID NO: 11386 - DNA, 3843 bp, Artificial Sequence
  Description of Artificial Sequence: Synthetic polynucleotide
ygygygtggttttyggagaggygtttattatttgygtggygttttttygygtyggagtgyggttttgtttttagygttagtgygtygygyggttygtyggtttygtaggattggttatygttttttatttatgtaatttgygtgtgygtgtgygtgtgtgtgtgtgtttttttttygttygttttttttttttgtgtgtaagagagygagggtgggggayggaggtaggtaggygagtaggtagggaggggaagaagagaagggaagttattaaatatatatatatatatatatatttatataygygygygtatatattygttttaattttttagaagtttygggattgtagttgttttatgtggggtagtagtgttggtagggaygtyggtygggagyggtygggagygggagtyggtygtgygygygyggttggaggttygttggggtttygtttttygygggagttattgttggtttygttggagttgagygtagagttyggatttgtttttttttgggygtttygttayggttygyggagtagaggagtygygtygtygagagagagaggagttatyggygyggygttttgtttttttgtygtygttttygtygttttttyggyggtagtagtttgtagttayggtaaggyggygtgattygttttayggaaaagygttttggggatygyggygaygtttygttagttttatygttttttgtattgttggttygggtagggttygggtagtttaygyggttgtygagggtttygggagatgtttgtttgtttttttggtttaggaggagggaggttagggygygggtggtygaagaggtaagttgttttggagtttggagtygtygtagttttyggagttygtygyggattggagtttgggagtaagggttgggggagggtagggaggtgggaagygggtgggagggaggyggygygttttaggttygtttgtttttttyggatttygtttttygtttyggttyggtygtttgtagtttttttgtagattagttygttttaggttttygtygggygttggaggagttygygaggyggygtygggttttagyggttgtagtttgttttgyggggtaagtgtyggttgtagtagtttygtaygggyggtggttggagtttagattttggagatgygattttagtttttygttttttgtaattygyggggygttygtttttttttatygggygttyggtygyggtattgatgttygtttaggagttaattgaggttgtagtygttagatggaygtttggagggttttygggtgtgagtgtgattgtatgattatttttatttttagtttygggaaatgtgttttgggttgaaatgtgattatygagttttttagttattttaattgttatttttaaatgyggtygttatattggaggagtagattggaaggtagtggggyggtgtgtgtgtgtgtgtgtgtgtgtgtgtgtggatatatataygtaatygaggaatatataattaattatttgggtgaagggyggggggtttatttagtgagttttttttggygggggggtygggygagttagttgttygttgttygttttttttttgtttgttttygtttaggygaggttggaaagtattggaaatttagttgygtggtttttaattttggaaattggtttygtttttagggtaaaatgttaaggygatttatgtattygygtttatgtggatgagtgtattattgtttagttgggtgtagagtttttaatagtatygygttaagtttttattygatttttaatttttttttattttttaatygtggagagagggtttatagaaatgtagttatttgtaaattatygaygtagtgaaaggggygtagggaggtagttagagttttgtttgaatttgtatattggtttggtgtttgtagtataygagattatttygttgttttgtagaaggyggtggtggggtaagttygggattttaatygtyggggtggggggtggggggaagagggtgtttatgtattgagttttgaggtygagtaaggagagagatttgttgagyggtatygygggtaattatataagttgtttyggtgattattyggaattgtgatgygagttttyggttttygaaagataagtttgaaagtttgtttgtttggggagtgtaagtatyggggygtttttatttyggtttgggtagttaggataygtttygtattayggygtttatttgtgygatgggygtygggtgttgatgttgttgtttttaaagaatyggttatygaggtagggattaagtgggggtattyggaattgatygtagaggaggagttagttagaattgaggttttattgggtttttagagttttaagttttttttyggaggtgttggaaggttttttagggaaygtygtttttagaaattgatttggtgttttggggagttttaaagtttttttttttygttttttttgggygtttttttttgttttttaagttttgtgttttttaygtgtttagaaatttgttygyggtgtttggttttttttggagatgtttaggtagtttagttatttaggtttaygttggygaggggttagagggagtagaaygttggttttgtygggttgttatttttatttatatttatttttggttttttgygttagttyggygttgatggggaygggatggggttggggtygggtatggttttygttttttygtttttygtttttgtagatagtagtttgtttttgttgygtttatttttttygtttygtygtttttttttagygtygtagtttgtgtattaygttgatgggttttgatagagaaattatagtaagagtatgtttttaaattttgattttygtttgtagggggataagttattttagttttgatatagtygtggggaaygttgaagtttgggatatattggttttgaatttttttttttttagttygtagttaggagatggtgatgtgtatgggtggggagtgttttgtttttgttatattttagygttttgaaatttttygtttttttttattgaaattttygatttgtttgaatttgttttttgttgtaaaataaattttttttttygtagatttgtggggtttttyggattttttgtygttgttatgatttttaataatgygattgaaaagttagtgttyggttggaaaaaaatttttaggtgttagtyggtygygttttgattttgttgaaggagtttttaattyggttgttagaggggttttggtttagtygtgggaatttaggaagaaggagggygtttyggaggyggttgggttagtttttygggtagggygggaattaggtygyggyggggatygtagagggggaggggaygggatttygyggtaatttgtttttyggygagtygggttygygtattttagttttttygttttagtttttygtggttygtttttttygtyggtttttagttgttttygtggtataggagtyggtygygattttttygygtttttygtyggagttygygggaygtygttaattttgggtttttyggtggtyggagtagyggtgygaattagyggggyggtygggtgggyggggtttgggygggaaattggagtygagaagatygygttttaggttaagttttagtygtaagygtygygyggtatagtgtagggtttyggtygygtttttttttygttttyggttyggtygygtttttgyggatttatagygygtttygggygttttgtagttgggtttttagygggggagtttttttygttaaagttayga

SEQ ID NO: 11387 - DNA, 384 bp, Artificial Sequence
  Description of Artificial Sequence: Synthetic polynucleotide
yggttggtygggggaygtgttygygttgtttttttttyggtygttagggggygtaggaagaagttttggaggtttgtttygggatygygtattygtttttttttttygttagttttttttttattttygttgagtttygtttygtygtttgttttttgyggtattygttygtataygaatttagttygggaatygagttgygggagtgyggtttgtgtygtttyggttaggagtttgtygattgtagaygttttgygaatyggtaagatgtgttttttggggttgtttttttttttatygtttyggggttaagttattttatatgagtataataaygagttggtgaygggtagtagttatgagagttygtttttygattttygg

SEQ ID NO: 11388 - DNA, 1432 bp, Artificial Sequence
  Description of Artificial Sequence: Synthetic polynucleotide
yggaygttagggggtgtttttagttttagygtagaatttygtttygtataatttatyggattagttaggtygtygaagggtattaggttttagttattaygaygtttygttygaygggtygtagttatgtaggagtggtagaggttgtttgaygaagttttttttgggggtygatgttttttttygggtgggaaggggygttgtyggtgagggttattttggygtyggtttgygtygttygaagtygggggggaggggaggttttygtttagtaggggttaygttygtttyggaygggggtygygygggygtttaggygaygtattttygtyggggttygtgatygttaygttyggygggyggygttgygttttttttyggggtttygtttaaggttgtagttyggttygygtygtttttagggygtttttttygttygygttgggagttyggyggtygyggtttttttygttagttttagttgtagtttgtttttgttgttttttttygttygttygttygttygyggtttgtagttttygggttygtttygaggtggagggattgtttttttygggggttgtaygtattygtagyggtttyggtttttygtyggatatatatyggtttttgtaggttgtaaagaatagyggygagaatgtatyggttttttttttttttgttttgagtttygggtgtggggggaggggaagtyggygaatagyggyggyggtagyggyggyggyggyggtagygggygaygtaagttyggatgtagtttygggggtttyggygttgagaaatagtygattttagtggygtaggayggataygaggayggttygggggattgtgtatygggtgtgygagttygtaagtygtagtaggggtygygygygttgggtttttaygygtttatggtttygggyggygygygggggttttyggggtygtagtttygygtygtttggygygygtyggygtttygtttggttttaggttygggtgtygygygtygygttttataggygtygggttyggttgttygtttttttyggtyggygygygtagttttttygyggagtagtyggttaggtagttttgttygttgtttygttttggttygattgataggygygagygtyggtagtagttttygygtttygtttttygttygtttttygyggtttagtttaattagyggyggttgagaggyggttattagggtgaygyggtatygygttttgygaggggyggagtygggggtygttaygygygtttttygyggtaaaatttaaaggtyggtagggyggttttttaatttttttttttaagtagggaygaggyggaatttgtttygygaggattgtaattttyggtatgttgygygtyggygtygggtggaggggtttygattgggggygtagggygt

SEQ ID NO: 11389 - DNA, 325 bp, Artificial Sequence
  Description of Artificial Sequence: Synthetic polynucleotide
ygttgtygtygttgttttttyggtttttttgttattattttttaygttttgtagttttgttttttgtttaygggttgttaagtygyggtttggtyggtggtggtagtggyggagttagataaagttttygtttttttygttttagagttttttaggygttttaagtggygggaaggtygttagttttttaggtttygygttttttgtttggygtgggggtggggagtygygtttggttttaggagttttttggtttttgttaatttttygtttttgtatattgygtttattgtttgagatgygtygagayggttttygttgaygt

SEQ ID NO: 11390 - DNA, 1242 bp, Artificial Sequence
  Description of Artificial Sequence: Synthetic polynucleotide
ygtttatagataaygttttttygtygttggygttggttygggatgyggtttygagatttttgtagtygygygttggtttaggggattttygtaggaygygggygggygtyggggtygggtygggtttgggtagagtgataggtttttagtygtgagttttataagtagatttatttataatatttyggataggagtttaggtygygtygttygygtygttygyggggattyggygtgaatttataygttttttttttatygtttygtygtttgttayggtttygagattyggttagttttttygggggtttttttygtygygtagtatttygttygtgagtagttttygtttgygtttttttttttttagggyggtygtttttattttyggtttttatttagyggggatttattagggygagggttgaagatttygygggaygtygygygtyggggatagygaygtatttatttttttagttatttgggaggttgtaggttygggtyggagttygaggtttaggggygygyggagtagttttggttaaggygtagggygyggggttgtatgggggtttagtttagygtgtatatygtgtattttttagygtagggtttygygttttttygtagttyggtaayggtygttattttagagtttygtttattaggagtttygtttagggtatygtttattygggtttygtttttatygyggttttygtygtggtttygttttygtttagagtttygtttttagygtatattgygttagtyggatttgttttgtagttgggttttttggaggtttttatttygyggttattgaagyggatgagtgtgaggttgattgggggtttggggatgggggatyggagattattaagaatatggttgtgttgggaaatttttttttagagtagagagggagggttttttttygtyggggtgttttttattttttagtttttttygygtgggttygtattttagttagaggggatayggyggttaggtttgygttgttgygtttgagtttaggtyggtagaggtygtagatttyggttttttagtyggtagggattygtaggtgygygtttttayggaygtttttyggggaagttygagttygttttttgtaggtygggaagtattygtttygagayggtygtattttygtagyggaagggygtttgtattatagttgtagtattagygygtgygaggyggggttagggtygg

SEQ ID NO: 11391 - DNA, 1460 bp, Artificial Sequence
  Description of Artificial Sequence: Synthetic polynucleotide
ygygtttttgttttttttygatttagtygtaaatttygagttttagyggtygttttttttttttttygttttttttgatttaaggttttaaaagataaaygtgttatttttygtttygtttttggattttggtttygatygaatgtagtggggatygagaagygtaaggtttaggatttgttagaggggygygttaagggygtttttgtttygttaggatattatygtttgggtattttattttattttttygtagttttttttggggtygggyggggyggggyggggtaggggggtygggygyggtttaygygttttttygagtgygyggtgygggaygggygyggttgaygygttttygtyggtgtttgtgttttttygtaggttaggagggtattttgygttgttattyggatttggygggtagygagttgtagyggggtaygtttayggtygagtygtagygggaatagagyggygtaggtttgaggagtttgggygyggaygagyggttgyggttggtygagtttaaygygtagtatygygygygtttyggtttttttttygtgttygtygygygttttagygatyggayggyggtgtygygygagttggygygtyggttgttttgttygttygygtaggagttgygtattgttttgggygaggtgaagaagatyggtagtttgygtttggtygatttttttygygtagatttygttaagttgtagttgtygygygggttagggattygggaygtataatyggaygygygggggttayggttyggagttgtgygttttgggygggaggyggattygggtttggaatagygtttatataygtgtataaaggaagtggagaattgaggtaattataygagtaatgagtttttttgttygtttatttataygygtaygygttgttaaaatatttatattgtttagtgttttgtttyggatttatttagtttattgttttaattttttattttttttgyggttttygatattatyggtttttgtggattttaaagygtttatttagttttttttaatttttttttgttaagttygaattgtaaagtaaaayggayggaaaaggaattttttatgttatagyggtttgtttgtttttttttttttttattttatttgttgygttygatttttatatgtgagyggaagyggtgttttygtttttgggtattaggggagtagattgggagttaggaaagttaaaygttggtttyggttyggtttggggagtyggggaagtygtaggaaggaggyggtgggtygggaagagttttgygaagggaagagttaatygaagggttgggaaggygtttygtggggayggayggaatagttgtagttatygtttttaaaaggygggaggygtttagttaaagatttttttyggaggtyggttttgggggggtggttygattgtttygg

SEQ ID NO: 11392 - DNA, 1064 bp, Artificial Sequence
  Description of Artificial Sequence: Synthetic polynucleotide
ygattggyggttgtgtggygatagygtaygtttagtttttggaaagttttgtagtttattaggagagttttyggggygtttttttttttggtttttttagggatttgygggtagtggaggagttttttatagygaggtagygygtttaagtyggataggatgtttaygyggtatttttttgtttygggttggaaggygaattttaggtttygygygtttagggtattgttggtttttagtagtttttttaygattagaggtaagtttygagttataatttttagttgggtgaagattatttttatttttagtattagtggtagtattattgttttttygggygygttatagygtagttgtagtyggaygyggtttygagaygggttgygygygtttaggtgagagtagygtatttygttagggttaaagtygtaygggaagygtttgggatttaggyggttyggtygttgggttagtgygtygttgtttagtatygaaatygygtagyggttttygggttgtatttgtaatattaggttatgtaggggatttagttagattttayggtygaaaggtattyggagttygyggttygttagtattatggtttttttagtagggatttttgtagttttygygagattaggggatagtaaygttttgtygaaggtagygggttgtgtygggaygyggtttattagtgataggagaagtagtagtagtagtagtagtyggggyggyggtggyggttttggttgaaagttggtggagttgtttgttyggygygaggataattygggagtttyggttgagtgtatggtttyggtgttygggtttggataggttagtttgagagtatgygaagtyggttttygggtagataataagagatatygtygggaagtgttaggaatttygygygttgttygyggggtttttttgtagtyggggttgggttagaaggatggtaaagttgygyggygtygttygggttggagtygtagtygaggagtygaagtttttttaggtygtttagtttygtygttagygttttaatygygygg

SEQ ID NO: 11393 - DNA, 622 bp, Artificial Sequence
  Description of Artificial Sequence: Synthetic polynucleotide
yggtttgttaygygttttygtyggggtttattygtatttgggtyggggttggtgtttaygygygayggttygggagtayggatttttgtttttygtagtatygtttttygggtggagtyggyggtttygtttygtagagttggggttgtatttggggtaayggggtygggtttggaygttaggtyggaggagtagtatttgttaggagtaygtttygtyggtaggtygtaggagttttgggagtygtygttatgggtaygttyggygggtggggggtyggtygggttaaagattyggagttaygyggggygggggtyggtatygagggtygggaggygygaagggtaygyggyggygggaagyggggygattygaaggtttaygggggtygggaggttgyggggygttygggattttttttygggtggttatygtgyggtyggggygyggaagttagaggtgtttagaggygtygatttygtygaggttgygattttggttygttygttygtggggtattgtaattttygtatttttattttgygggtygggagtgygtttggagygggaygggatttagygggtgayggtaggggyggtagaaatatygtttaattggygg

SEQ ID NO: 11394 - DNA, 1622 bp, Artificial Sequence
  Description of Artificial Sequence: Synthetic polynucleotide
yggttttatygggttgtaagggtygggaagttgtgtygggggygttttagaggttagagttagggagggggttygygatataggygggttttttaggygggtttagggttaggatagygyggtattattyggttagttttttgtagttaggatgaaggtyggggatagaygtttagttttagattttttagatagggttgggtagtgtyggtgggtgtttgggagaggyggaggygggygtatttttagtattaggttygggaaggatayggtgtttagtygttggagtttttggtttgygtgttttattttgattttttggtatttggtgaayggttttttygtagggtgggggtagttaggggatttgtygaggaaagttggggatagygggtttggtggygyggttyggygyggygygtgtttggggygygtggtyggttatagaattyggggagggtggaggttttygggtaygygtyggggtggtgggtagttygggayggtagyggygattygttatttgaggaggggyggggattttatygyggttaggtygaggygtygagggttttttgyggttttygttttttttygttggtttygaygtygygttygggtygggattygagtttyggtttygyggggtaggtttaggtttgygygttgygtttgtagtygaggtagaaattygtttygaggygygggygtygggttygggttttaaggatgygygtygggttttttttygyggggatagtygagtttygtyggygttttaggtgttttygtagtgygttygggygyggaygtttttttgttttyggaggggaagygggagggtttttggggtaaygtttygatttygggttttttaatttgggtygatagtyggttggtatagggaggtttgygygggagaggggyggagagagygtagygyggggtatagygggyggttttygtgtygygygygygattggaaayggygtgtagattttaaaaygagggttttatagagggttaygaggggtaggagagagttttyggagaattttagtttttygatayggttattttttggtaaaygagygagaattggggygtagagttttgggagggtygttttttyggygggagyggttygagtatagttttatagtagatgygagygyggygggygttttggtgaygaagtagygggatttgtaggaggtagaggtttggtggggtygtggaygttaygtygagttgtttagatttttttagaagatagtggggattatttaayggtttttagtagaaattaagttaggtgttygttttayggagattgttyggttgtagggtggaggttggatgagaataggygtttttttaggtaggygttygtggtggtaaygttgtttaggaggagggtaygggtttygggaagatttgygaggttaaatyggtagtttyggagaattgagygtaagaggtyggtgatatagagaggagttygggaggtygtatgttttaggttgaagttatttggyggggaygtttattgagatgygaaatataggaagggatagaggttgygtagagggaaaaggygatggattyggttttggaaaygt

SEQ ID NO: 11395 - DNA, 324 bp, Artificial Sequence
  Description of Artificial Sequence: Synthetic polynucleotide
ygatttttygagggaggagatagygtygtttttttatttgtataggtgttttygtygtaggtttygtatatttatttatggtatttatataggggttygaagaatatgttyggtttagttaygtggtagatgtagaygtygtagtygtagyggtttyggtygtggtatagygyggttttygggggttgtttaggtgygyggtagygtygtttygattyggttygggatagtttgtaggyggygttyggttagtttttgygygggygataagtaatyggtaggtygggttagaygyggaygtygttttttgtttygaatttaygt

SEQ ID NO: 11396 - DNA, 1881 bp, Artificial Sequence
  Description of Artificial Sequence: Synthetic polynucleotide
ygtattyggtttygaagaaggygtttttyggataaaatygaggaatttgttttgttttgtaaggaattagggtttgttgatttttagattttaaygagaatttttgtttttygtaggygttttataaatttttattggataattttatygygygttattgggttttygggagattygtgatttttattygttttgggygygggttygtagagttttaattygygttttyggtagtygggatttttygttyggatyggtttttaggttggaaatattatggttygtattyggggygtagtygagatttatygygtyggaggtttygggattygtttagatygttgtttggttattttaygtttttgagttttttatatagttagtttygtgattttygagtttygtgattttygagtttygtgatttttaagtttyggaagtygttgtaggtagyggtttagttaggtttygttttttttatyggagttttaygygttaattttagttaggtttygttttyggtygttttaggygtggatttaagttaggtttygttttttgtttggttattttaggygtttatygttttaggygttttttagtttaagtttaatgttyggttgttttagaygtygatagttttatgtttygttttttaatyggttgttgttggygttttttggtttaggtttygttttttattyggttgttttaggtattttttaggttagatttygttatttatyggtygttttaggygttygtagttttaagtttygtttttygttyggttgttttaggyggttttyggtttaagtttygttttttgttyggyggttttagaggttygyggttttaggtttygatttttgttyggttgtataaggygttttttgggttaggtttygtttttagttyggtygttttaggtttygtttygttttttttgtgygygtttygttyggtagtttgtgggaygygatygyggygttagtttygtttttttgtgttgyggyggyggtttttygagtttttttygaygygttttttaggttagygagtttygygtttttyggtgayggattatgtyggyggygggagygggygygggygtagaggygggtttttttagygaggagttgttttygtttygtttttygttgtatygygtttgtygygayggggatttggttaygttttgttygttgttgtagtagatattttaygtttatttggtttttgaggattttttttatggttggaygttygtgtattgggtygygtatttyggtaaggtgggtgygaaygttttaaggygttatttttttyggttgtttagtgggagtyggggaaagygggtttgaggtgygggggaygtggggygtgtygggatygyggggyggaagygggatygayggygtttgtgtttygaggggtttagggygtttgtgyggtagygttygyggttyggagtygyggyggggtagtyggggggygyggggyggaagygaggtyggtggygtttgygttyggaggggtttagggygtatgtgyggyggygygygtagtaagtttttaataaggygggttttaagggtttyggygtttgttggtyggattttgtgygagygygygygygygyggatggtgyggggttttttaggtygggtyggaggygygagygatttygtagagtygggtattaggtygygaagtygtttaggyggttttyggggagtygagttggggttagaggygygyggggaatgttygggygyggtygattttttggtttygtatagtttygttagtagtygagggtygygttgyggaygagtttagtygaggagtaagygtttyggygggattggaaggtttygg

SEQ ID NO: 11397 - DNA, 944 bp, Artificial Sequence
  Description of Artificial Sequence: Synthetic polynucleotide
ygtttatagggygtygyggyggygttgtagagtttatagtagttygtgtygtygtttygttygttagygttttagygaggaagtagygygtagttygyggtttagygtattygtagtagygttygtagttygttygygttatgttttaggyggtygagygtttttaggagtgggttatggagggttttygygaygggttgaagaaggagyggttattggaygatygttaygatagyggtttggattttatgaaagaygaggagtaygagtagatggttaaggagttgtaggagattygtttygagtygtaggaggtgtygygyggttyggagttttggaagtagtagtttatygaggayggggattygtaagtggyggaggttyggggttgggggtygtygggagggygggaygygygyggtttgggggtgggaggygtygggtttggagttygagtygggggattagygatgtagtygggygggygtygyggtatttyggggtttttgtatygtttygaaygttgtagggttgtagggtygygyggggtatyggtttaattyggaggggyggyggttgggttttggtggatggtagygtygttataygttttttttttttagattygttttttaggtygggggyggggyggtagyggggaygygaagttttyggttgtataaggyggggygggagtttttggtygttggygggygtygagtagtygggaggggaagtatagggygtttygagttggygggagggyggggyggtttggtyggygttygtyggggtygyggggggaggggggyggaaagtttttgggygtttgttaggaatatttagtttataataatttygyggaaaatatygyggtttyggtttttagaaatttyggttttgygtaatttttygtagttygygtttttttgggttttaygygg

SEQ ID NO: 11398 - DNA, 1514 bp, Artificial Sequence
  Description of Artificial Sequence: Synthetic polynucleotide
yggagtygaattyggtgtttttgttygtttggggtttygttagygygtygtaagtttttttagaaatttaaattttgtaggtygtatttttaattygtattttatttaggttttygtttggygtygatttgttttagtttaattttyggtttygtagattaggtatttttygggaygyggggtagattttgygttygggttttttttygtagtygggttgttyggtttttgygygygtataataggyggtayggygtagttttygggagygygggattygggtgttagtttyggygtttagttatagygatatagatttgggtgtyggggttygttagggagttttgtgattyggggattttygygatgtagagaattagggatygygtayggagtttaggygygtagtttgtagttaggattagtttttygttttygtygttgaagtygtttygagttttaygtttttttygttgtygggttyggttgttttagggtttygttygttygttttagagtgagygattttygatttayggagaagygattttattatyggtgttygatatttagagttaagggagygagaagaaggygaagaaagaggyggagagyggtgtattgttttygttgggattygygatttttagaaattttttygaaatttagtttygtygtygtttygtyggtagggggtatagygggygttyggggygyggyggttgagygatggggygagyggaaagggtttagaygtttggtttttgtttatatttyggagaaagttttgagtattaggygttgggttttttggttatttttttgattttttttatyggygtygagtttgttttattttttttagttttttggtttygttagttagaggggygtttygygttygtttygttttttatttaygtttttygattygattygttttttygaattttygttttttgagatttygttttygattygttttaattggtygyggyggtagtygagtygygggagttgygygttgagttygyggtagtayggggagygttygttygtttygttttggatttaattaagygtttygyggaggggtgyggttatttgggggtaggagaaagyggagtaygttatttttttagggatttaggaagygaggygagttttaggtggaygyggtggtgtggattayggygattagggtttttttttttgttgtggagayggaggtgygaggggaygtyggyggttttttattttttggtygagtggtttttttygttttyggttggattttttyggggygttttttttagagtygagtygggttggtygggggyggttgtttggtttgagtgtygttttattaaagyggaaygtyggaggggaggttatttygagagaaggyggttttyggyggaggtggtttygtgaattttgtagttttttgttygttygttattygagaygtygygtttygtgggttttaygttggatggagggggygtygtyga

SEQ ID NO: 11399 - DNA, 2144 bp, Artificial Sequence
  Description of Artificial Sequence: Synthetic polynucleotide
ygygtttggatgygtttttyggattyggttttatataagttttagtttttyggattttgtatttttttygyggatttttttatttttttatttttaggtttagatttttttttgtyggaatygttaygtttttttatttttttattttygttttattyggtttttttttttttggtttttattyggttaggttgtttygttttggtagttttygagggtygttygaggttttygtttattaatygttttygtttggaagaatgygttygttygagygtattttyggygggtgttaaagtttttygttttaataggtgtttttgtttggttaygtatagttttgttatttggggttyggayggagayggygataggatygttttttgtagggyggttgyggtttygtaygttttygttygggtttttagagygttaagggttttygtagtttygtygtygttttygttgtgttatattgtttttgtttttttgttygtttagatgtygygaggttgattttatgtaagggtatygttaagttygggygttgatattgtttatttattygtggtggyggattttaaggttgggagtgagagaygygtatagtgygagatttttttttaatttagagaatttyggggaagttgggtgttygygtygaagaagygggtttaagttgattyggtttagaagggggttygaagttaggygtagygtttagagagtttttttttatttaygtttttattygatgttttttgtttttagaaggttggagaggggttgygtattgttatttaygygttyggttgygagtggtttttatygttygttygtygygygttgggttyggtagtttttyggggtataygaggttttygtagtttttagattttyggtttyggtagygtagagtygggagagtygttaygtttttagtygygygygtaygtygggtttattaaatttgtagtatttttttttagtttttattttttgttatttttttttagtyggtgygttttagtttygtygttyggtagaggttgttataataaygggtaggaatgttttaatatatataaagtyggttyggygtagygggtatttagttttggtygggtttygygttttyggtygtygygtagggtttggaygygygtygyggttttttagtyggtyggtygaygttyggggygtatttataatgagygggatggtgyggttttygyggagttgtttygattttttgtttgttttttgygygtttyggtygtyggaggatgttgygtgggttyggttgttttgttataagtagtagaaagtgtttaggatttaggttayggttaggatggygatggtattggygyggattttttttatggtgggtagaygggygttttaggtgggggattgggtyggygtgttttyggggtyggggygggggygttygtagttttagttgtttgttttygttygygtttagttgtttagttttgtagagtagaaaaaggagagaggtgggggggygggggggtgatagggagagataggatygyggagygatttttayggttttaatgttttttagtttygagygygygygtttttygggygtttatttattygtgygtagggtyggtttygygttttagtygtygtyggttgatttattaggttattgygtattgggagagaagygygtygagtgggaagyggygygggtttttttttygygttygggaattyggygagatagaygttygyggyggaatggygattggttaaagttagtttyggtttttatygttaggtgatygaaygttyggtagttgttttygygyggttttggtyggttttgtygatttatatttattttyggatygagyggttttgagttatygattggagaygygygattttygatttgggttygygtygygagttgtagtttygggttgygttttggygygggatttaaggtgtgttyggygagtttttgtgtaggggyggttgggygggggagagttttgagtttgtattggaatttgtagttgagattagttagatygggttygtttagaggagggattggaagttggtgtatttgatattygaagagygygaaggggaaaygaygt

SEQ ID NO: 11400 - DNA, 379 bp, Artificial Sequence
  Description of Artificial Sequence: Synthetic polynucleotide
yggtgygggttygtttttttttagtttagtttttttgatatygttttttttttggggaygttgtttgygggttygygygttttygttttygatttttttgtaggttttttygggggtyggggtaggatygtatttatygaggattygggygttggagttagtagtagyggtaygagtaggagtagtygtattttagtttgygggagaygtattgggttagagyggttyggggttttygtagttgttttgggygygggygagagtgtgtgggygygtttttttttatggtttataggtgattaggagattygtaataggatagtygggtgygtttyggtgtatygtagagaatatagygtgagggygtttygtygggygg

SEQ ID NO: 11401 - DNA, 637 bp, Artificial Sequence
  Description of Artificial Sequence: Synthetic polynucleotide
ygtygttttatttttaataagtygaagtttttgaaggaggttyggtgttatttyggtgtgatygygtttyggygaygttgggtagggtgtagggagttagttyggtygyggtttagygggaggggagggggtyggtttygaattygggygttygggtygygggtgatttattgggaaygttaggttygygygtttagatyggygggygaygtttagygygttttaygtttttygttygggtygttygygtagaagtagttttygygtatttttgtttttygagayggattygtygggaaggagtttggagtygggyggtyggygggtagtaatttttttttttttagttattatggtyggtgygattttttattygygttygtagayggattttttggaaagtatygggttgggtttatttgattggygttygtaggggtygtygatttttttatagatttayggaaattgtyggtygtaagtygaggttyggtttttagtattygtyggttygttygygtyggttttttaaagagttgttagatttattygttagtagtttttttattygatygttttgtaggtgyggtgggtttttttttygttttygaygygygtgygtattttygtgtygygg

SEQ ID NO: 11402 - DNA, 959 bp, Artificial Sequence
  Description of Artificial Sequence: Synthetic polynucleotide
ygggagtggggygggtaggaaygagggtttgagtttaggatygtaattttygtgaggggttygaggattttagtttaaygtttygtygggtttygtttttatttttttttttatggygagttygtygaggtttygtygtttygttattygtttttagygtygygygggttttgttatygygtttaygttyggttaggyggygatttttygygttttgtttygtyggttgtygggggtttaagaaatttygggggggyggggtygggggyggggtgaggttttygggggtyggggyggggtyggggagggggyggtggggtygggggttyggtttagggygggaaatgggtggggaggggyggggtttgggttggagattggayggaggagtygggyggagatgtaattggaggaagagggygggayggggyggagaaggtttttygtatyggyggagggagagggattaggagggggttgyggygggggaggagagggggttttyggtttagagattgaggygagggtggygggagyggygygtaggtagggttggggtggggygtatatagtgagygttgggggygttggyggtggagtttttgaggtttttygaattagtgggttggggttgygagatygagtygagttgttttgggyggttagagatgtgggtatatagaggttttttttttttttttttygaygtygggtagtgggyggtggtttggttttttttttggaatttttgggyggggtygggtttggagtttgggtttttgttyggagggtggtgttataggaagagttggagttgagagtygggatttyggggtttttttagggggyggttygtttttggtttttaggggtttttaagygtagtgtttttttgttttttttgggtatygtttaatttttttygtatttgagggtygattattttttygatttygygg

SEQ ID NO: 11403 - DNA, 826 bp, Artificial Sequence
  Description of Artificial Sequence: Synthetic polynucleotide
ygtttatttttgyggygtygtgaaagaaggygtaggaggagggagttttgatattttttttygggttggggttttatagyggygaaaagayggagggagtgatygggggtygyggggattttttygggaygggttttygtyggaggagtttyggaaagtygttttttattttygaggtttygtttgygygggygttttattagyggtyggggtggtggyggyggyggyggyggyggyggyggygyggggyggggygtygygatttttgttttttttttgggtygagyggtaggygygttygtatygttttygttttttygtygtagtygttgtygatyggttggttgggttttgyggygtgaggatttyggyggygtygtagtttygygagttatggtttagttyggyggggaggttyggttygggtttaagayggyggtgtagattygygtygttatttaggaggtygaggaygtggaygagttggaggaygaggaggagggggyggagattyggggygtyggggattyggttyggtattttagtttyggttggggtagygygagygaggaggagtygagtygygggtataggtaggygyggyggttggttygggaggtgggtttygagggggygtygggtygygygygagttyggggygttgattgygygygataatttttygggtagagggggttgagttagtttygtygtyggggaagtagtttygggtygagtttttgagttagaatyggttygtggaggtagtyggtgttttagttygtagtttygtygtttaatygaggtttttagggttggyggtygg

SEQ ID NO: 11404 - DNA, 2156 bp, Artificial Sequence
  Description of Artificial Sequence: Synthetic polynucleotide
ygttygaggaatyggtttaatygtttttygttgtagtyggtttgtttttttttyggaattatygagggagaggygygtgyggaggtyggygttyggatttygtattygttattgttgtyggygtattttttygaagttttatttygaagggttgggttttattygygygttttgtgygtgtttttttgtttttttaygttttttttgtttggttgttgygaggttttgtaggggaaagattggygyggggttygtattttgtttatgttataggaaaatygtgggagttttttygaygyggygtattttyggaagttttttttttaggagggttgygggaaggtygggattttgtatttagaygaattyggtygttttttaagaggaaagtyggagatttagttgaggggtaaaaatgttagggaaaggygagtttagagtttggtgatggagaaattgggaagttattttttattttttaattttaggatggggaattygtaattgaagtyggagttttagatttggggygtatttttagtttagtttaggaaagagatttaagggygtagtagtgtggatattttttatttyggtttygaaggtttagygagggtttaatttgggttttttgttaggttygtttttygtttttttttagttttyggttygtgygtygttgtttttttaagaagtttaggtaggtaggttyggttgttggagtygtttttatggtaattygygagttgyggyggttttatgaatatttyggggygygggagttygagygttgtyggagggygtttygggggaggyggtygttgatgtaagttyggygggtygttgggtttygttyggttgyggygggagtttygggaygggtyggaygggtyggggtagaggaggygaggygagttygygggtggttagttataaagttygggyggygagatagayggatagttagttttttygygggaygtaygttygggattygygygggtygtgygttttgtatttyggagyggttttttgagygtygyggtygtagagttttttyggtyggygtttattgtttttygygggggyggggygtttggagtygggyggygygtygygtttttgaaygttagagggagggagggaggtaagaagggagygyggggttttygygtttagtygggttygggaggaggtgtagygyggygagttyggggattyggagygggattaggatttttttygyggygygtagtttgtttaagtatgggygtttgaggttgtttttaygtyggyggtaaaggaygygtttttaygggyggattgatyggygggyggatttggagttygttygyggygtygygtttttgttttyggttyggttygatttyggtttttggygttatggataagttgtygtygtttatgygtaagyggttttatagtttttygtagtaggtgggggttaaggygtggattatggaygaggaagaggaygtygaggaggagggggtygggggtygttaagattttagtygtaggagtattyggttgyggttattgttttygttttttttttyggyggtygygggtggtayggagtttyggagttyggttttyggggtagyggatagygaagggtyggttygyggygygggtaagtttagtaygaayggygattgtaggygttttygygggagtttggtttygttgggtagtyggggyggyggtagyggyggtayggggagyggtagtagttayggatatttgtatgatttygyggaggagyggyggtttatygtygagggygaygygtttttyggygaggataggaygtttttaggtttggyggtygagttygagygtttyggygtttyggygtagttygtagtttygtygtygtygttttagtagttatygtagtyggttttygttttttgygagtagttttyggtggatatygttattaaagtggagggaggygyggttgtyggygattagattttttyggaggtygaggtgygtttgggttaggtyggttttatgtagygttagttyggggttatgttttaattyggggttaataaattttttttaaggatgttyggtagttagaaagtygtggagygygaataggagagggttaagtyggtygg

SEQ ID NO: 11405 - DNA, 1441 bp, Artificial Sequence
  Description of Artificial Sequence: Synthetic polynucleotide
ygtaaggaggaaaaygtggaatygaatatagtagttgygggatygtattaygtgatttttttttygyggtygttttatagaatttgtgggaaggggggggagggggagtgtygtygtaatttygaggataggttagtagttygygggttygattttagtyggygttttyggggttattatattttttygtyggyggggaaattatattttttataygttygaagtygtygttttttygatayggttygttyggtygtaygtataygttaygggtyggygtttttyggtataygygygaaggtygggtttygtttygttttttatygatttygyggagyggygattatyggttttaattagtttyggatttygggygygttygggtyggtttttttttyggtttagttttygttaatygggggatttatttygttgaattygtttattygggagggygygttttygttttattgttttatattygagggtaatagyggtygtatygtttatttgggtyggggggtttttttttygttttyggtygattgagtygggttggggttttygaggaagygygggtygtygggyggttggaagtgggggaaggagaggagggggagggggtygggatatygggagtygttttttttttttttygtygattgyggttttygtaggttggtygggygttttygtatattygtttagttttttatagtttygygtttygttagttttttttttattttatttttatatatttttatttttatatatttatattyggtygtttttygtttttttattygtttgtygygygygygygygatttygtttatatatagygygygygaygtyggyggagatygtttygtttttttagatygaaygtygttygttygtttgttgaggagyggygygygtttyggtttygtttttttggygtygyggygyggygggyggggggyggyggtyggaggagttgggggtygggttagygygtygagtattgtygagyggatttgatatttgygtygagagtygtttttttagtttttygttygtattygagttatygttggtttygggggaagagaggygatggatygygygyggggagygaaaagggagygygagggygtttygaggaygygtttttttattygtttttaaatygtttttattgagaaagggaaayggatggggggggtggggggygaggtttgtttttaattygaaatygygagattagtttttttygttgtaygtttttttygtttttatattttttgtttaggttttattaatttgygtttggaatttygataygagttttttattttttygggygtagggttttgtyggtatttygaygtttttygtttagttttttygtyggtygtygttyggagttttygtttayggtggttttttttttygg

SEQ ID NO: 11406 - DNA, 734 bp, Artificial Sequence
  Description of Artificial Sequence: Synthetic polynucleotide
ygggtttygttygttttgtttgygggtygatttygygaygtygatyggttygygttttygttttygagygtttyggygggyggagttgygggtgaggggggggttggtttggggggygggggtttygatgayggtatyggagygygtygtattggggatggaaatttgattgtttggttygggayggygtttgtagttaggtaggtgagtgtgggtyggagagygggttaggggygaggatygggtgggtggagggaggygygygtttttttttygygtaggtttgggtttagtggttttgggagtyggtatttttgggagatttgattyggtatgaggagttyggtatttttgttttttagttttttggaagtttttttttggattggtyggygtygttttttygatatttgggggttgaggtyggtatttygggtttgygtggaggggygagygttaaggttgygagagtygggtttygatttgtaattattttttttaatttttatggagtttygtttygygttygtygtttttagttttagttgttttgtttyggtttygaatagygtttgyggggttgttagagtattttyggagygggagygttgtgyggagagtaggggygygyggaagtygggattgtatygggttyggaaygtttaygyggaggggtgygygaaggtttatayggtattgygaggtagagtttatygttgtgtgtttagggtygg

SEQ ID NO: 11407 - DNA, 935 bp, Artificial Sequence
  Description of Artificial Sequence: Synthetic polynucleotide
yggyggtgtttagggggagagggttttagygtygtygttttttaagtygattygttygtatttggttttttttttatagggttggagtttggatgaagttttttatttttgttagattttagtyggggggtyggygtygygaggtttttatgygygtttttaaagttgtygygggggaggggttatttttygttyggggttgagattagtygagtttttygtttttgttyggttygtttatttygggygtatagygttagtyggagtagttttagtagttgygtttttagttygtaygygtttaggtttagtatggyggygygyggttygggygtygyggagtygtygaggagtygtygttygtttygtygtygtttygttyggygtttagtttyggygygattgyggtgagtttatttyggtygggagygtttttygygtttagtygygttyggtagagagtttttagtygtttyggatttygygtagtttygtagagaygygygtgtygttygtaygggtyggtattygggtygttttygtyggygtgttaggatttygtatagaagygttyggaygyggaygtaygtagtygyggttaygattttygtygttygttyggttygtgttyggttttggttagtagggttgttttatttttayggygyggygggagttygagggggttttttgggaaattttttgyggggygtygtggygtaggtgygtttttatttttagggttttattattygyggttatatttggggtyggatygygygttttttttttttttttygtttttgagggagtttttgtttgggtygagggggatttygggggtttgtttagttttggggtgaggggttggtttaatattttataggtttayggttattagtagggygggattatagtgggygygggtygtaygt

SEQ ID NO: 11408 - DNA, 1054 bp, Artificial Sequence
  Description of Artificial Sequence: Synthetic polynucleotide
yggggtgggggatattygggttgagttagttaagtygggagtgtgaggagtagygggggtyggtaggaaygtggaygygagattggggagtagtggggttgtttgtgyggggatgtagtttttattaagtataygggtygagggttgattataggtagagtagygttttttggtagygttgygggtgtggatgagggaagttaggtttyggatttatatttagayggtygttttttagtttgtttttttttttttgtgggtttttaaagtgyggtttggtttttttatttygattttgaggtttggaggtggggaygggattgtgggygtyggtaaaygtgagttttygagyggggygggaaaggagtttygygaatgttttttttagtttyggygttttaygtgtaggtttatgattgggagygtttttaatttaaatyggtattgygtygggattattttttttttggygtygttttygtygtttttttyggatttttttyggttttttttttatttttygttttyggggtttttttttgttgagygggggttgtygggatttgggattgyggggttgtttygatttygtagtygttygyggtggaagttagttygggtttggttttgagygygyggttggggyggtygttgtttatggtgttggygygggtggygygtyggtyggyggggtttgyggaggtttaggygtttttggyggggaaggyggygttttygggtttggggagygagggttttygttttaggggtayggaggatatttagattggggygttygtgggtttggtgttgtygtttygggygtyggtattttgygatatttttttttttyggttttgggagggaatygaggtagtttygygttaggttttttyggatatttggggtaaattygttttttagagtttygtgttttttttttaaatttgaggtagygatttttttatttttaagggyggtygtgaggtygaattatgtgtygattttagtyggtttttgtaaaygttgtgatgtyggttttyggaggtygygt

SEQ ID NO: 11409 - DNA, 1474 bp, Artificial Sequence
  Description of Artificial Sequence: Synthetic polynucleotide
ygttagygtygatgttgttgttttttygttttttttatttttatatatttttattygggttttygygggtttttygaattaagtttttagtttagtttttttaaatagtttatatagygataygggtattgggtaattgtaattagttttaatyggaagtatttgtttgtgggtgagatttatttgattttyggggtyggtygttataagggygagggttgaggatttttygtgggggatatgggttttttattagtyggaaagttttagygatyggttgggygtttttgggtyggattygygtygtygttygygtattggggttttygaggtgtgatgttatttgttygtagaatyggtttttttygygtygtttttttygygtttttattttagtttttttttygtygttttyggggttaatatggtagyggygtygtygttttattttygtaatygtaygattyggttggtagggtygtyggttyggattttygagatttatatttyggttaggttygtaygttttgygtttyggattttyggyggtttttygtagttttyggggygtygattttygttygttgttataygaggttygggygttttygatagttygggattaygttagagtgaygttatatatyggatttyggygagttgygggtatgagtaaygygygygttttygttttygagtttttttygtygtygygtttatygttgaagattatggyggtygaggygtttatgayggygaaaaaygaagtatattyggggtygtttttggattyggatatgtttgygggtggggagggggtaagttttgtgggtygaggyggtggyggaggygggggygaggaygggtygggtaygaaggtttgygggygggyggyggygaaggygattyggttygttagtygttgygttttaaatattagtatygtagaataaaatggyggtygyggtygygttatatgatttgggtttygtttttgygagtygtattatttygtatygtgggggagaygygttttygggaygttyggtyggttygttgatttttttygggttgtgtygttygtttagygattyggtttyggygttyggtttygttttgtttyggttttygygggtgttttygggygtygtyggtttttggattttygtagygttggatyggtttygygtyggggyggggyggtgtggtgtgtgttttattagtatayggggyggggtttyggaygtttygttttttttgyggttgygygtygtttgtaggtgttgggttttyggygaygtttttttttgtatttttggygtgaagttgtaggtygtggtttygyggttttgtttttaagayggggttttattttttygggygttggttttttaggatttttttattaattttgggygagttaagggttttagtagatgtgyggygygygggttttttttgttatagygttygg

SEQ ID NO: 11410 - DNA, 357 bp, Artificial Sequence
  Description of Artificial Sequence: Synthetic polynucleotide
ygggagatttygagattttyggtyggtgatagtaggygattttttgtttttgttaatttgtgggtttttayggaygtggggaagggaggagggaggttttagttttttgygggggaggggygtgaagaygygygggggtggggggagatgagtyggygtygttatgataaygaggtyggtggttyggttttggggattygggagggagggaggygtygtggtygygygygygggygggggyggggggttaggttttttaggagtagttggggaatattyggygattttggyggttgttttttggtggygtagggagttygygtgtttgygagtgygtgtgtgtgygaagtttttygg

SEQ ID NO: 11411 - DNA, 814 bp, Artificial Sequence
  Description of Artificial Sequence: Synthetic polynucleotide
ygtygtttaagagtttggggtygtggggggyggggttgtttgttatyggtttygtttygtygataggattygtttttttttttaggttyggyggggtygatttygtttttygtttttagtttgtygtaygatagyggyggygyggygggyggagtygggaggyggggaagtagtggtygtgtgagygtgaggagttgtygttatygtttgtttttygtttttttygtttttyggggttttagygtygtgggtygygtayggttttggaagagaygtygtttygtttttattygttttttttatygygtygttttttygttttgttttgygggtttaggyggaattyggaayggtygtttttttttttygtttttygtygtygttttttttttttttttttyggttttttttttagtttygggtyggagyggggtgtyggyggyggtyggttygggyggyggygtttggttatgtygtgtyggggaaggtaatgagtygtagagtttyggggtttyggttgagtagyggyggtattaattattygyggagttggaatgattggtaatttaggtgggtgatyggttygggatttygtttygatttttygggtttygtttygggygggtygaggtttagggtygyggggttgggaggygyggtttaggttttttatttatyggagtygggygyggttttttgggttttttttttttyggttaggggaggaaggtygyggggaggygaggtttaagtgttttttttttttttgtttgtttagttyggggttgaagtygagtttyggggttttyggygg

SEQ ID NO: 11412 - DNA, 847 bp, Artificial Sequence
  Description of Artificial Sequence: Synthetic polynucleotide
ygtggtgagatatygatttygtagagtagagggggyggyggtagaggggaagggttttygtatttattttttttgtaggaggtgtatttgtatttttygtatttgtaggagttygygtaggtgtaggagttatttagagagggygaygttataggaagggttaatgtggaygaattygggtttttaygtttgttaygaggagatggggtgttaagtttttttgtttttygygatataggtatgttygttttttaygaggtgaagaatagggaattaggggttttttttttaagtgtttttgagygaaggygtagggygtgggtttttttgtaggtataagggygygtagtgygtaggatgygagygggggygggggtttattagaagggtaggggtaggttttagggtttatgtygaggagagtagtagttggaggyggtgaaygggtttttttaagtaattggaygygyggtttggttagtggtagtaggtggygatgtttttatagtttygggygggggygygtatgttaagttygttgggygttygtttttgygtatygygttygtttttttygtttgtgygtttgggtttyggygtaygtattgtatttgtygttygtttttgtygtgtgtgtgtattgtyggggttygttygtttaygttygygygtgygtttttatttttatttygtattygygtgtaygatttattygtygtygttgtgygygtattgttagtttatttttygygtgggtttygtaggggaygtgttygtygtagtagtygttattgygtggaagygygtaygtattattttygaaagtggagaaaaaggygttttgygt

SEQ ID NO: 11413 - DNA, 589 bp, Artificial Sequence
  Description of Artificial Sequence: Synthetic polynucleotide
ygtgggtgtttyggaggaaayggtygtagttttaaattttttagtttttttagtagggagttttttygyggagtttygtttggyggtyggaagttattttaagtygtttattyggaagtygtygttttggtaattgggtatygttttattttttttttttagtaaygtttatygttttagaygtttgaggttagtygagtttygattggtttttttgttttttattttgggagaygtttgagatttagygtttttagatttygtatttgaatttgtggygtttggtgttygygagttgtygaatgaagttgagygttttagtggaattagggattttaggggtgagygatygygaggggagagygaygaaaagggyggtyggagttggaggggygyggagttaaataaaaaagggyggtyggagttgtaggggygtygagttaaataygttatttttagatggggggttttaggygagttgtttagtttttttgaggtaggtttttygtttgttygttttttygtagtttttgagttttttttttaygtygtttttyggtagttttagagaygttaygtttgttttygt

SEQ ID NO: 11414 - DNA, 848 bp, Artificial Sequence
  Description of Artificial Sequence: Synthetic polynucleotide
cgcggcgtattttttttttcgtattatatatatatatatatacgatgatatatatttttgtgtttttttcgatgtaagtggtttcgtttttcgttgggttttaggtgtttttgtaggaaatgcggaggcgcggggagtttagggaacgggtttggggttttaagttcgtgatttttatttttatttcgggttttagttttgcggcgtcggttcgtagcggatttatcggacgatgtcgaatatgataagtacgttgtttagtagttttacggcgtatacggtcgagtagagcgcggtgatggcgattgttagggcgagggacgaggcgtttcgcgcgtttggcggtttcgacgtattggcgttagcgttggggtaggcgttagggtaggcgttcgaggcgttggcgaagagcgggggttgtagttcggcgtcggcggagggggtcggttttatggttgtcggtcggtttcgtcgcgtttttttttatcgtgcgttttgggcgcggggattcgacgcgaggggagcggtaaggtagaggtcgcggtttcgacgtcgtcggttgtcgcgtttcggtcgtttcgttgtttttgcgtttcgttcgtttgtttcgtcgttcgtatcggtttagttttcggcgttcgttcgtttttttcgttcggagcgttgtgagttaggagtagtcgtaggtttttcggacgcgttcgtcgcgcgtattacgtggttcggaggcggtcgttagtttgcgttcgcgatcgggggcggacgttgtattatcggttcggagttgggtaggggaggtttttcgttttttttttagggatgtttcgtcggttcgagtgcgatttcgt

SEQ ID NO: 11415 - DNA, 1230 bp, Artificial Sequence
  Description of Artificial Sequence: Synthetic polynucleotide
cgcggttcgtattttttttgtttcgcgggcgttttgcgattttttttattgcgttcggtttcgatagaagtttagggagtagtggttttcgcgtttcgtacgttagacgtggggttaggcggtaggtttttagtttaggaatcggggagttttttcggaagggtgtgttattcggagttagcggttttttacgtatttttttagagtgagaacgtacgcggcgtagttatcggttcgttttttttatcgggggttttcggatttttaatttgtttggggttgtttttgtttttcgggcgaggggtttttggggatttaggatatttggttacggggaggcggggtatggggggtagaaagttagatggagcgggtaggagaaggggggtgttgggaggagttaaggagggagagagggggcgtgtatggggcgcggagttaagagttatcgagtttgggcgcggtgtgtaggcgagggttacggttttcgtagtagcggggaacgcggggagtcgaggtatttagcgggtcggggaagaaggtgggggatttcgcggacgtcgaggagagggtattgcggagttagtaggttttgtagggagtcggagaggggttgagtagattttgaaggcgggcgggggacgtatttttcggcggggtagggtgttttcggatacggcgagcgcgcggtatagttcggtagggtgatagttttttagcgtcgcgtatagttcgttcgttgggggtttaggggtggcggttgcggtagggggtttcggggtcgggatcggagcggcgggcgcgattttcgagtcgggagttcgggcggcggggttcggggtggtcgtcgttttttttttttgttgtagttttttgagtcggcggagggttatggtttcggcgtcggacgttttttagagacggcgttggtttttttcggcggggttggcggcggttgggggatgttagtcgggcgggtcgcgggtcgtttttttttataggtttcgagagcggggcggggttgggggcgggcggggagttgtttcgggtggtttcgtttttagtacggaggatttttttcgcgaggcgtcgtcgttttggagtttcgtttacggcgttcgacggtcggggaaattgcgggagttgggcgtttagtgggggaaaacgagtcgcggacgcgaaggggcgggatgaggttttcggggcggggttcggggttcggggttgcgt

SEQ ID NO: 11416 - DNA, 1094 bp, Artificial Sequence
  Description of Artificial Sequence: Synthetic polynucleotide
cgcgggagtttttcgagttttattggttttttttttcggtcgtcgttacgcggggcgtcgcgtttttacgggtttagacgtttagttaatttttcggttttgtaaaagtttttgggggtgcgcggggttgggcgggggtgcggcgtggttttttttagggtgggttttaaagtttttattttcgttcggggcgttgatatcgtcgattcgtaagtttatgtcgcgttcggagcgtcgcggggttagtacgttcgggcgggcggttcggaggaggcggcggtacggttggggtattttcggtttcgattcgcgatgaatggggcggttcgggtttcgtttttcgtagtttcgttcggaggtttcgtttttcgagtttttcgtttcgcggttttcgttagtacgttgttcgggcgttttttaaattgtttacggagtcggatttcgcgttgttaacgtttcgtttcgggtaaggttgcggttttcgtcgggtttcggcgttcgttgtttcgtacgttcgggttcgggaggaggaggtcgggggagtcgggtcgggcgtcgcgagcgttgggagggttcggtttcgtcggggagcggttttcgagggcgtaggagcgggagtcgggtcggagattttcgcgtagttcggtgatattttcgtttcgcgttttagttcggggtttttaggtatcgcgcgcgtttaggcggcgtattcgtatttattttcgtttcgaggttcgtttcgttcgttacgtcggtcgtcgttaacgagttttcggttcgcgtcgttttagcgttttgtagcggaggcgtcgtttttatttcgatcgtaggttcgttcgggtcgttcgttcgtcgggtatcgagtcgttttgtcgcgcgttgcgtttcggggcggggtgggaggagagggagtagtcgttattttgtttaggtcgtcgcgggttagttttgtagttagttttagttttgggtcgggtgttgggaaggtcggacgtcggtcggcggtcgcggggtttgtttttcggaggttggggcggtttaggttatagatttcgtcgttttcgtattttttttttagttatttttagcgtcgt

SEQ ID NO: 11417 - DNA, 1979 bp, Artificial Sequence
  Description of Artificial Sequence: Synthetic polynucleotide
cgtttatttttttcgcgtgttggagaattaattagtaaggtagggaatgcggttcgtgggcgtttggtttttttaagcggtttaggtttttagagcgcgaggtttaggggttttggagtcgcggtcgcgacgcgttcgagggtcgtttttttcgacggtagagtaagagttatcgcgcgggagtttcgagcgatcgtttcgttgtttcggtatttttttttcgtagtcgtttagagttttttatgtttcgtgacgttcgttagggtagcgcggtcggaggtcgggtcggacgtggttcgagatgttcgggggtaggtagaagattacgggtacgcgataggtaatcgtcgtttcggttttagaggtggacgttttgtttttttgcgttttaatattagattttgtttttagacgatatttttgttgttttcggtatttggaaagattaatcgttaggttcgagaatgtaagatttatttttttttgcgacggaggtagttaatttagttgttcgttatttttagtgtcgtatgcgtttttacgtaggattttgtttaatcgttatcgggacgtttttttagtttcgttttcggatcgttagagaggttgttaatttcgttttttttttttattttattagcgtattaatttacggcgttgtgacgtgtatagtttttgcggtcggtcggggcgggttaatggcggtggcggatacggcgggttaatgggcgggagcgttttatgcggtcggttttcgtcgtagtcgtcgttgggttttggagttagaggtcgttttgagacggtgcgcgatggatcgagggttttagtcggggaggcgtcgtcgtcgagttcgcggttagacgttttattagtagcgttcgtatcgggagtcgcggttttcgttcgagtcgtgggcgcgttcgaggggcgggttcgtttttcgtcgtttttcgtagttttgtcgggttcgagttcgcgtcgtcgtcgtcgtcgttttgtcgttcgggtcgcgcggttcgggaaacgcggtcgcgggttgtatgggtagcgttcgcgtttcgtcgttgagtcgtcgcggagtcgcgtagttttcggagtacggtgagaggcgtcgttggtttgggggcggtggtcggggcgggtacggggtattcgcgcggttttgcggtttgtaggtttttttcggcgacggagttgcgtcgcgggttttcgggcgggtttggggggtcggggtcgggtgggcgggggtttttgggggttcggggcgatcgtgagggattaataatgggtttcggagcgggtttacgggttcgggttcggggtagtcgggggtttttgggggttcggggtggtcgtgaggggtttatagggggtttcggggggggtttgggaggtcggcggagtttgggtcggtcgtaaggggcggacgggggtttcgggcgggtttgggtggtcgggggttcgcggcggttttgaggggtcgattgggggtttcggggcgggtttgggggtcgtgggggttcggggcggtcgtgagaggcggatagggggtttcggggcgggtttcgggggttcggagcggtcgtgaggggcggacggggggtttcggggcgggtttgtaggttttggggatttgaggttgtcgggaggggttgttagggggcgttggtcgggcgtcgggttttgcggagttggggcgtcgatttttgattcgcgagaggggcgttttcgtcgtgttggtcgtagttgttatttttagcgtttttattattatcgttgttttgaaatgagagtaggcggttttcgggtttcgagtcggagggggagggcgaattggggatttgggggcgtcggggttgtaggaggcgcgcgtaggtcgaggaggggtaggaatgcgggtagtcgtgtggggggtgttagggggagggtaggcgggcgggtgtggggggtggttgggaggaaagcggtggcggtggcgg

SEQ ID NO: 11418 - DNA, 1930 bp, Artificial Sequence
  Description of Artificial Sequence: Synthetic polynucleotide
cgcggggagatcggggcgcgcggtacgcggcgtttttatttgtggatgtttatttttcgtggagggcggtgggttttgtcgtaggagattttggcgaagacgtcggttacgatgacgaaggcgattatttcgtaggtgatgtagacggtgaagttggttttgttttttttcgggtcgtatttgttttcgggtttcggcgatattattttggtgttgggcgtttgtatttatatcgggttttggtagttggtgtattggcgttggtttagtttttcgtggcgttttttgtagtagaagcggtagtagtaggtatcgtagtagtataggtagtcgttttcgttgttgttatattcgaattttttgtcgtattggtcgtttacgtcgtagtagttttagtacgtttcgtaggtgacggtcgcgttggtcgtcgtcgttatagtcgtcgcgggttgttttcgtcggtttttcgttttcgggatttcgggcgttcgggcggtgtcgtttagttcgcggtcgtttcgtgttagggcgttttcggtttttcggttttcgacggtagcgtcgtttgtatttagggttcggttggcggcgcggtcgcgggtttcgtggacgttgggtagtaggtttagggattttagcgagagtagtagtagtagtaggaggcgtcgtagcgttatggcggggtcgggcgggagggcgcggggaggttttcgcggtaggtcgttttttcggcgggtcgggttcggaggattcgtcgcgcgggtcgggttggaggcgttgagcggttagcggtttcggggcgatggcgttatcgaggcgcgggcggtagtggcggcggcggcgcgcggtgcgtacggatcggttcggcgcgggttgttcgggtttttaggttgcgcgtcggtttcgcgttttttttgcgggttcggcgcgttttttgggtagttttatttttcgtcggcggtgattgcggtttcgcgcgcggttcggtttaggtaggattcgaagcgcggtttcgggcggcggcggcggcggcggcggcgtggtttcgttcgggcgggttttgcgggataagacggggagtcggttacggggtggggcgattggcgtttcgggagtaggaggagaatcgcgggtaggcgggcggggagggtgcgcgtagttttcgaggagagagattcggagtcgggaggggcgtagagttcgtttttaagacggggtttcgcggttttgcgcgtttggaatcgagagcgtacgggtcgtttttttaggcgtagttcggtcgttcgggttttttagtcgttcggtttcgtagcgcgttttcgtcgtaggttggttttttgggacggagtcggttgaggttggggttcggcggcgagtcgggagagcgcgcggcggttggattttatttatttattatgttcggttgcgattgtagaggcggcggcggcggcggcggcggcggcggcggggcgaggcgggaacgtagttgtcggagcgagcgagcggagagtcgtcggttcgtcgtttgtattagtgtcggaacgtgtgcgagagtgagcgagggagatatacgtatttatatattcgtatatacgggagcgtcgcgaggggaggggggataggggaggggagggtagtcgtttttcgttatttacgtttgtacgttcgggcgtttagggtgcggggcgggggggattttttttcgtttttttcggatcgtagtagttgaagtttcgcgttacgaaagtttcggatagtagttattcgatacggcgaattcggcgggcgaagagggggtcgggagtagggcggaacgttcgttttgtagtcggttcgcggtagggattgattttttttgttattgttttttttagttttcgcgattagtttttattttatcggagttcggggtagcgcgttgtttgagcgg

SEQ ID NO: 11419 - DNA, 3177 bp, Artificial Sequence
  Description of Artificial Sequence: Synthetic polynucleotide
cgtaggtggggtaagttcgggttatcgacgagatttgttcgcgttttcgtttttattttggtgtttttttttttttttggtagttttttttttattcgtttatttttcgggtttatttcgatttatttggcggtgggtttttttttttttcgattttcggcggtgcggttcgttttttttttgatttcgcgtttggtcgtcgtgtttcgaaggatatgggttatagatcgtgcggagatattagtttcgcgggcggttgttttggtttaagtagaagaaaattatcggggttagcgtcgggtacggtagttttttcgtttcggagttcgcgttgttcgggtttttttttgttgatttcggtttcggtcggttttcggttttcgataggtcgttgagtcgtatgaagtttcggggttgtttcgatttttcggcgttcgttttattttttttttcgtttattttttggttagtcggggtttcgggcgattcggagaggggtaagcggcgttttttagaggaggtgtttttacgtaattcgggggtttcggcgggggtatatttggtgggttttagggcgtaagttgagttttcgggagggttagtttagtttagttttttttgttcgtaggggtatgttgttcgcggggcgtcggggcgtagggaaatttcgttcggcgcgagtttcgttttttttgcgtttttggggtttttcgggttagtcggtcggtttttttttattttgtttcggttttttcgtttcgcgtttaggtttcggttgtcggattcggcgttattttcggcgaagtcgtttcgagagggcgaacgaaaaggggggtagcggcggagggcgggggttcggggaggggcgtttttttttttcgcggcgtagttggagtcggatttaaggggttagtatcgtttcggtttcgcgttaggcggcgggggaggggaggagggatttttttaggggtgggtttggagggggtgggggcggttttttttttcgtttcgtcgcgggtttattgttcgggaggggcggggagatagtggggggtagtttcgggcgggagtggaggcggagatgtcgtcgtcgtagtcgtcgcggtggttgtcgttgtcgtagttgtcgtcggcgttatagttttttttttcggtcgagacgcggagcgagcgagcgaaagcggcggcgaggagtttcgcgtatattatagttggattttttattttaattttaagtttcggtttcgtttttagatagtttcgtagttaatcgtcggacgtcgtcggtttcgagtcgcgcgtttattggtcgttcgtcgtggtagtgcgggcgggagcgtagggagagaattatagttggaattcgatttttattttaaaatttaggatcgttttttttttttttttttgtttttgggttcgttttcgaaggttggagttaattagattgttgtttagatcgaatttatttttttattggttattggggtttttgggatttttttggagggagttcgaagaattagagtattcggcgcggggttttggcgtagggtcgtaggttttaggtattttttgtttacgatttttgatttgggtagtagtcggaggacggagtttagttttgggcgggtttggggaagaaaggagataggcggtacgggggtgagggttgttattagggggttttagagcgaaattttaggtttttatttggttaattttttattttggagttgagtttggttgcgggattgggggagggaaggagcggagttggatgttttgggggtggggttttaggttggaggggtttagttttggagaaacgggcggagttcgagaaaggttagggtaggtatggtttgggcgtggtttttataaattttttgggtttattggttatattttcgagttaattttgagatttcgattttgatttcgtaattttaattcgttggatttgattttatattgacgtttttgggttttatttttttgtttttagggattttttgaagggcgtggattttacgtaggggtttcgtgtttgaatacgtggttttaggtaggtcgcgttggatcgtagagttcggatttttaggaggggttgcggagtagagcgaggatttttaagaaggaatttgtgggggtttcgagtgtgtgggagggggcggaagtatagagttgggttttatcgattcgatttttaaagtttttattatcgttattttttaatttcgtgttttagttttttttaagtttttatgtggtttagggaaagagtgttcgcggaattggaatttcgcgggtttgtcgtttttatttatttattttaattttatcggtagcgggttttcgtgggtttgtgttttttacgcgtgtatacgtacgcgtagatttcggtttttgtttcgtttattttttcgagttttggggtttagtcggttttagtttttttttgtcgtcggcgttattttagaaagttgtgggtattcgggagcggagcgtcgcgggtgtgttgggcgtcggtggaggggggaatagcgaggattagacgtcgggaagtatttttttaatatttgcgagaggtagatacggcggaatttagtgggttagttagtttttttttcggagattttggggcgtttgcgttattgcggagaggcggcgggatgggtcggatgatttttattattattttttattttgttgaggttattatttttgggcgttgtttatttttttaaggttgtattatttacgtagttttcgcgtatttttcgttatcgtagagggttggggtcgttttagttttcgtttcggtcgatggggggaggggatgggggaagtggtagagtggttgttgcgtcgtcgtttttttggttgttttttcgtcgaatttatgtatagagttgtgtaaatgaggtcgggcgggtttatttgtattttatgttaatgagtagattttttaagtgttttttttttttggcgggagtttttgtttttattttgagtatgcggcgtttgagttttgaatttcgtgtcgttttttgggaaaggggggttatttatggttgtttcgcgcgtttgatatttttttttttttcgagaggtcgtagtttgtcgggtcggtttgtttttttcgttaggatagaggtttcggggttggcgcga

SEQ ID NO: 11420 - DNA, 2195 bp, Artificial Sequence
  Description of Artificial Sequence: Synthetic polynucleotide
cggtagagaggacgttatttacgagagagagtgatcgcggatttttatcgagaggtaggcggtggaggggttttttttggagatttcgattatggagtggttttttttttttttagttcgagtcgtagcgtcgggtttttttatttttttagtttttagtcggttcgggtttgaaaatttttagcgatcgagcggagttggcgcggcgtttttagttcgtaggatgtttagttttttcgtttttgttttcgtttatttttcgtcgtttcgattcgattttttcgggcggcggagcgggaaggtagtagtttttatttgggattcgtcgtcggtttcgttttagcgtagcgtttggggttaattttagttttaggcggggggcgggcgggggtgggagggacgcggcgcggggcgttgggttaggttcggttttggttgggatggcggggttcgggtcgggacgtagggtttgtttttttttgggatcgaggttgagttaggcgcgttgggttgttcgttttcgcgcgggtttgtttttaggtagggttttttgttttcggcgagggtgggttggagtttgtattatcgttatattatttttatttagggcgttaatcgggcgttcgtcgcgttttaggtacgtgcgtttcgtttatataggaataaagtttgttcggtttttttcgtttcgatttatttttaggttgagtcgattcgtatttttcggttggtgagggagatgggagtttttggttttgtcggcgtgtgggttgttgttgttgattgttacgttttcgtatgcgggcgcgcgtatatttacgcgtatttattttttgggttcggttttcgtcggggtaattggtgtgagggtgtagttttgcgtattttttatcgcgttttttagagagcgcgtttacggatacgcgcggggttattttggcgcgttttcgtgggggatatttagtttttgttattttcgttttggttttttcgtgagatatattttaggtatagttcgttgggagcgggtcggagcgaggcgtatatttaagatagagttcgtttttgttacgttttttgcgtttttttttttttttagtttgtatacgtggatatatcgtatatcgaggttcgttttttgtacgtacggtttttttttgggatttttattagttattaagcgtacgtgggatcgttattaagcgttttttttacgcgtgggtcgagtttagattattttggatcgtgggtaaaggtttttttcggttcgattatttcgcgttcgggttttttgtgatcgttttaggttttgtttaattcggagcgcgtttttttttttcggcgttttcgttttttgtttcgatttgttttaattagtttttacggttttgtttttcgaggtatagtgtttagcgcgattttttgggtttttgcgtttcgggatacgttggttttgatttcgagttcgttttttttaggaggttaggtttttattagttttattttttattttttgtttcggggtggatttgtgggttgttattttttttttttcggttttaggaatttgttgaagttggatcgtagaaattgggaagcgaatttaggttggtatttatttagttcgataaataagagatttttcggtcgttttttttcggggttgttggtttcgcggggggtggggtgcgtagttttgggggttcgtagcgaggtttagttagttcgcgttagaggttcgtaggggttgaggcgtatagaggagggagaggttgttgggtttggttagggttttggagacgcggagggagggtagggcgtcgagtttcggggtgtcggtttttatgacgtcgaattgtttgggggatcgttagcggtgcgtcggtcggagttagttggtggcggggcgggcggttcggagtgtttgtttaattttgagcgttcgcgagggggaggggaggtagttggttacgggttagggggtagtaaggtggaggagcgggggttgggaaaggggagggtatttttcgggttgtttgtttgcgtgtttgtcgcggtttacgataatcgggagtttaaattttatgaattattcggagttgttggagcgataaattttaggttggttttttttttcgtatatcggtttttcggatttttggagggaatgtttgtttagcggtcggagttggcgg

SEQ ID NO: 11421 - DNA, 2063 bp, Artificial Sequence
  Description of Artificial Sequence: Synthetic polynucleotide
cgtttaaagtagaggcggtaattaggcgttcgggttacgttatttgataataggatagatgttgtacggttcgttttttttatacgtattatttcgtagttcgtagtatcgttagaaaatttatttgattttagagtcgtagagcgtttaggggttttttttcgtttattcgtagtacgtttcgggtttttttttttttttaaataacggtatcgggtttttgtattaaaatacggcgggttcgcgtttgttattattagtgtaaaatttgcggggggttgttcggaaaggatcgaattttatcgttgtatgagttttaaaagggagggggtatatttatttttagttttttattttattttcgtttgattgtgatgtatatcgggcgtttgtatagtttcgttttatattagtatatacgcgtttcggtttcggtcgtttttcgtcgttttttttaaattcggtcggttcggggtttggcgtcgtacgcgggtcgttaggggttagcgttcgtttcggttcggttcggtcgaataaagggttcgcgaatttttcggtaaagttgcggttgcggcgaggagcgggcggattgtcgcgtttatttgggtttcgttttcggcggcggcggcggtttcgcggggtttcggtggcgcgggtttggcggcggcggcggtacgaataatcgttcgagggtttcgggagtgcgcgggcggcgggggttcgtttagcgtcggcgttacggatttaggtttcggcgcgggcggcggcggcggttgcggcggcggcgcgggcgagtgggcggcggcgcgtttcggtaggtttaggttcggtttcggtaacgtcgcgacgcgtttttttttttacgttcggcgggatgcggtttcggcggggttcgggttttaggcggcggcggcggcggcggtggtagttgcggacggttgggcgcggggtcgtttcgtttttttcgttttcggttcgggcgggtttgcggttattgcgacggtgacggcggcgggagcgcggcgggcgttgggattgttttgttagggggcggttcgggcggcgtttaagattgcgcggcggcggggtcggcggcggcggttacggttttcggggtcgtcgcgttgaggtgcggagttgttatcgcggttattttgttgttttaattgataagaattttttttttttcgttttagttagacggggcgttcgcgttttttttttcgtttcgcgttggtttttaataggaagtcgtttcggtttttagtacgtgatttttatcgtatttgtatatcggagggcgaattggttaatcggtattttgtatttgagtttttttttcgcgcgtttttttcggtttattggtttttcggttaggttacgtttttttttttttttttaatattcgttcgcgttgtggttttttgtatcgcgcggggagcgcgtcggggtgcgagcggtgcgcgtttcgagtggtcgggacgcgcgttagttttgggagtttgtattgttcgggggggttacgtggagatttgcgtggtgttttttatcgtcgtcgtttgtttttcggtttttgggcgttgtggtttcgcgttagggtgttggcgggaggggtgtcgattcggttttgcgcgttcggtgggtttttcgggttagcgtttcgcggcgttcgggttttatgttgtaattgcgttcggcggcgttcggcgttcgtatcggcgcgcgtttcgttcgtgtcgtgtatacgttttgtatcgttttattttgtatacgtatacgtatacgagtttttggggttttggagtatcgtgttcgtttcgcgtttttcggttcgtttttgcgtttagtcgttttttagggagcgtttagttgcgagtaaaataagtttcgttgcgaaatagtttttcggggagatagtttttttttcggagtatagatattatatttttatcgcgtaagttttcggttcgggtcgaattcgggcgtttcggcgtttacgtattttacgattttttttcggtgtttcgtacgtcgtcgtgattttttattttacggtttttcga

SEQ ID NO: 11422 - DNA, 816 bp, Artificial Sequence
  Description of Artificial Sequence: Synthetic polynucleotide
cgtagtaaagagtttcgggcgttttgggggagagcggttttaagtttcggaaagtgggtagagtttttttttttagggttgagacggtaggcgcggggtttttttcggattcgtttcgttaaggggatagtgtaggtcgtgtcgcgatttagattcgacgttttcgcgggtttcgcggcgttcgggttgttttcgtcggttgggagcgttcgagtggttttcgggaatttatcgtgaagtaggagggtcgggaataggtatttgagtaggaggcggcgcggttaggatatttttagttttgttttggggtttttcgtacgtcgcgtttcgatttggtgttcgggtaattgggcgcgcgttttgtttttcgttttcggtcgggtgcggtcgggttaggtcggggttttaggcggttgtcgcgcgttttatgttcggcgggttaggcgcggggttgcggggcgcgcgttttttgggcgtcgtcgggcggttgtgggcgtttcggttcggttcgcgtttcggtttttttgtcgttcgtttcgattttttcgcgttcggtttcgcgtttcgtttcggtcgtcgtgtgcgtcgttttgagttgtagtggtcgttatcgttatcgtagttgtagcgtttttttatatttttagcgcgtcgtcggtcgggtagtttggtcgcggtacggaggaggggttttggagggggcggtcgggggaggcgacgtcgagttatcgttttcgggtagtcgtcgtcgggggggagcgcggagatttgaaagggcgcgtcgggtaacgttttttttttttttatttcgggcgt

SEQ ID NO: 11423 - DNA, 368 bp, Artificial Sequence
  Description of Artificial Sequence: Synthetic polynucleotide
cgtgtcgtttgcgttcgtgggttatatatattttttttttttttattgttttttgggcggtgtggattagttgtagagtgtgatttgcggttagggagtgttttttcggagttttcgtttttagatttttggtgttaaagacgttttgtgagcgggtggggtcgggcgttttagttacggcggtcgtcgtttttttttttcgtaggacgggatagcgtttttgtggatcgcgttttagatgggttatagcgaggtggtgcgggtgatgttgttgcgcggagtcgatcgcgacgttgcgcggaacgtgagtgttcgagtcgcgcggttaaagagcgaagtttttcggcgcgtttgtgtggagaaaacgg

SEQ ID NO: 11424 - DNA, 1411 bp, Artificial Sequence
  Description of Artificial Sequence: Synthetic polynucleotide
cgtttttcgcgtttttttcgcgcgcggtttttggagtttttgaggcgcgcggttagtttagttcgggttcgtagtatcgggagtagttcgtcggttaagcgagcgcgggtcggggtcggggtcggggtttgggggcgtcgttttcgggagtttttttgcggtttttgaggagcgagggcgacggcgaggttgatcggggtcgaaattatgaatcgaagtttttataagttttagattttgcgattttacgattgtagcgtagtggaagttaagagtaaggtaagtttttcgttcgtttcggcggttttgcgtttagttttttggttaatgaatggggcgtttcgcggagggggattggggcggcgtggaggcgataggcgtcggcgataattttttagttcgggcgtcgcgcgtcgtttcgcgggacgcgtattggggatttcggtcgtttttttcgtttttcgcgcggatataaagttcggtagtcgcggcgtttagagggtcgagggttatcggatagttcgggtagattttggattcgtttcgcgggagttgtttttttgttttacgagtgagaggcgatcggggcgcgttatatattggaggggagggcggttttttcggggcgagttgagggttaggggttgttcggattcggggtcgtgggggggttttgggggttcgggtcgtgggatggttttggttaaggcgtttttaaggttgtaaaggaggtttgttatttgttaggaggagatttgtcgtcggtttcgagttcggcgttttttattcgttcggtattaaatatttaggtattaggcgcgttttttcgcgtagatttagagtacgtattcggttttttttcggtttagatttagattacgttttttcgggcgcgttttcgggttagatattttattttatttttacgggcgcgtttttattttagatttttttattttcggacgcgttttcgttttagatttagtttattttttcgggcgcgttttcggtttagatttagatttttttcgagcgcgttttcggattagattcgtatttagattatttttacgggcgtgttcggtttttttcgttgtttgcgttcgggcggagcgtgttcgaatttgcgggtcgcgatgcgcgtttgggtaattggttggtaggatttggcgtttttgttttttgcgggggtggttttttcgtcgtagatgttattgtttgtgagggtttttttggtggatttcgcgggttgaggaggtgttgtagttgttcggggttttgcgggagggggtttttcgagtttttcgttggttattttttgggagttgagcggttttttcgtttttttttttttcgtatttcggtttttagagttgtgggaaaggtttttaacggcggagtgggagttcgt

SEQ ID NO: 11425 - DNA, 1487 bp, Artificial Sequence
  Description of Artificial Sequence: Synthetic polynucleotide
cgggttttgcgattcgcggcggaggcgtatagtaggcgtttaaacgatcgtgggtttagggtttcgcgttagcgttttcggggttttttggagagaggtagggtttcgtcgtttcggttttcgtaggaattagttggagaaaggcgggcggtttggggttgaattttttttattttttatttttttcgtcgtttggagtagatacgtcgtcgtcgcgtttttgggaacggttagggaagtaagtagaagtcgggaagtcgcgaaagaggcgagaaagtgcgattttttttttagattttcggtttttcgtcgaaatttttgtcggtcggttaaattttagataatggaagttttacgtttttatttttatttttttttataagttcggtcgcgggtttttttcggttcgggatttcggcgttagtttcggagtcggagtttgtacgatacgttttttttcgtcgttttatttttttattcggagatcgtttatttttttcgttttatttttttatttttcgtttggtcggtttcgttcgattcggaggcggcgtttttttttttgttttaggtttaggaaggaggacggcggaggaagtagggggttttggttgcgggcgtagggatgtgggtcggcgatcggcgttcgagggcgtaaaaaggcggttcgaggattgcgcgcgggcgggtagcgcgggaagtcgggaagaaaggagggcgcgcgggggaggaggttgcgggtgcggggttcgaggtcggggcgtttattttttcgcgtcgttcgcgttcgtcgtttagttttcgttgtaggttttgcgcgcggtttttcgtttcgttcgtttgttgttgtagggtttggattttgcgttttatcgtttttagggagttgaggtcggttatggcgcggaggcgtagaggcgtacgggtagcggcggacgttcggttgggttcggtttcggcgagagttgtatagtcgcgtttcggttttttaagtttttgtttgcgcgggggtcgttttcgttttttttcgtttttcgggtcggttgtcgtcggggcgatgaggttattcggtcggatcgtcgacgttagtatcgttgggggagggtttgacgtcggtatcgttggttatagttgttggaaagtgttttttttcgggatttatttggagaaagcgttgggaggcgtcgttttttttttttttttttttttttttttttgcggtttttttcgttttttcggtttcggggtttcggtttggtttcgtcgcgggttttcgtatttttgtatacgtacgtcggaggttttttttttcgtgagttttagttttttttgcgcgttttttaggttttcggaatatttatttagttcgttttttgttttttttagttttttttggaggtgcgttagttttttttttatttggggacgatagagcgaggaacgggttagtttggggggggggttacgttttcgaggtgtaggggcgg

SEQ ID NO: 11426 - DNA, 602 bp, Artificial Sequence
  Description of Artificial Sequence: Synthetic polynucleotide
cgcgtatcgttgttgtattttttttaacgtattcgtaattttttttaacgtattcgtattttttttaacgtatttatattttttttaaggtattcgtattttttttaagttattcgtattatttttttttttattttatgcgaagattgtagtttcgtagttttgcgattagcggtcggaagtagttaagatgttattgtttttagtatgtttcgcgaggcgcgtatagtataggtttttttttaaggttattatttttattttcgttgtatgttgggattgtagttcggtcgttttgtgattaacggttggaatcgtttaagatattattttagttagtatggtcggtaggagcgtatcgcgttgtttttttttagggattcgtatcgttttataattttgttttgtgttgagattgtagttttgtaggcgtataattaataagttgggtgtagataagagattatagtttttcgtattttaagtaaaggttttttttttacggagtttttttacgcgtttattgcggtttcgtcgtgttaaggggagtttggttgtttacgggttttatttgttagcgagaagatagtttggtcgggcgg

SEQ ID NO: 11427 - DNA, 628 bp, Artificial Sequence
  Description of Artificial Sequence: Synthetic polynucleotide
cgttttatcgagaatagaaagtgcgttttaggtattattcggatttcgttaaattatattatttagaaggtagtgttataagggacggaagtcgattttaagttatagacggaaggcgtagaggggcgttttcgtagcggcgtgggcgggattttcggcgtttagttttcgttcgtcgttaggttgcggttgttgtggttgttaacgttatattgggtagaacgttagataggggttatttttcgagatcgagtagagacggatagtgaggaggataggatttatttatacgtttttatgttagtcgcgattttatttttataagcgtttgtaaaattttttttggggttttggcgatagttttgtgtttttacggcgcgtagaggcggcgtcgcgaattttgtgtgtattttatacgacggcggggattgaggtttttcgtagtttagagtcggagttcggggtcggtcgagttcgtaggatcggttttttcgtcgatttttacggttttatttagttttttgggtttatggcggcgtcggcgttggtgagtggagggtttcgtagttcgcgcgagttcgggttatcgttcgtatgtatttattcgttgtaatacggcggatgtcgg

SEQ ID NO: 11428 - DNA, 215 bp, Artificial Sequence
  Description of Artificial Sequence: Synthetic polynucleotide
cggttgcgtattgatcgtatttgttatgttttattttttttaatcgaagttgaaggtcggtttcgatgtttgttattttttataattttatcgtagtcgatagttttataaatattatcgttcgtttagttttcgttttttcgggtcggttgttatttcgcgttttcggtttggttttggtttcgtcggttgtattgtacggttcgttttttcgt

SEQ ID NO: 11429 - DNA, 2638 bp, Artificial Sequence; identical to SEQ ID NO: 7166
  Description of Artificial Sequence: Synthetic polynucleotide

SEQ ID NO: 11430 - DNA, 2172 bp, Artificial Sequence
  Description of Artificial Sequence: Synthetic polynucleotide
cgcgtaggttgtgtacgtgtttgtgtgtacgtgtttttcggtgtgtgttttagttttagtgtgttggcgcgtgttcgagtatagatatatcgggggtgtttgggtattcgtatatggttgcgggtggggcgtagtggagaggaagtttatatatgcgtgtgttgagatatggtcgtatttttgtgtttttttagtttagacgtaggggagattagtatcgagatattcgagttcgggagttttttagcggcggtcgggcggagtttggttttacgtggggttggagagtacgtaagtttggagtttcggcgttcgtttttcggttgtcgtcggtttttgtagaatcgagtggtcggatggtagttcgcggggaggttcggttattcgttcggttcgttcggggcggggagaagaaggagagttggagagagaatcggtcgcggcggtcggagaggcgagcggagtgtaagagaggcgagcgtttttgttcggcgttcgggcgcgtttttcgtttttttcgttcggttcgtttgttcgttggttttttttttttttttttttttttttttttttggttttgtttttttttttgattttcggttggatgattgaggtattttagacgtgggttgaattagagcgagcgagcgagtttaggggttgtagcgatttttcgataagttatttagaggcgattttgtgcgcgcgcgttttttagtggttttcgttcgttttttgattatgttgatatatttataggataggtagtagtatcgatgcggcgttgcgacgttatagttttcgatattttttttttataatttagttttattttttagtattcgatttgtgaaaattacgtttatgtagtaatataattggttcgaaagcgttaaagagttaattaagaggttttcggtttttcgtagtttatagcgtagttcgattttttagagtcgtcgagtagacgttcggtgaattttagaggcggcggagggtggcgaggagttttcgttttttttcgtttttttttttttcgatttcgttttttttttttttttttttttttttttttttttttttttttttgttttattttttttttttttaaattttttttgttttgcgcgtttggatatagatttaggaagcgaattcgtttacgttttaggataaggaagagagagaggtacgggagaagagtttagtaagatttggattgaaatcgagatatttttcggaggttcggagtagaggaaggaggaggagggcggcgaacggaagttagtttgtaatttaagttttgatagcgttggtagaagggggtttaaattagatttttttttttttaaaggagagagatttttttcgttttttcgttttttgttaaagtcgggtttagtatagttgtagacgttattagtgagaaagagggagaggaagatagatagggggcgggggaagaagaaaaagaaaggtaaaaagttttttaggagaattttttatatttgtaataaaagatttaggggttggagagagatttttgggacgtagggttggagtgtttatttcgagtttagcggtagggttcgggcgcgagtcgagattttgttcgtttttttcgtttttgaaatcgacgtttaggagcggttttttaaaaacgtaaggtataaggacggttattcgcgcgattatgtttgttgatttttcgttttgttttttttaaaagcggttttttattttttaaaagatatttttttttttttttttgaagtgtattagttgtgatttttgtttttttttttttttttttttttttttgttttgttttttttttttttttgaattatgtgttgttgttaaataataataaaaaaataataaaatatagtagttgcggatttgttttcggttggagtttagcgtttcgtttggagtggatgagtttttttatgagagattcggttatttttgggataagtatggtttattattcgtttttattttatcgggcgtcggatttcgttatgagcgcggtgttgggttattagtcgtcgttttttttcgcgttgacgttgttttttaacggcgcggcggcgttttcgttgtcgggcgttttggttaagtcgattatggattaattggtgggggcggtcgagatcggtatttcgt

SEQ ID NO: 11431 - DNA, 2548 bp, Artificial Sequence
  Description of Artificial Sequence: Synthetic polynucleotide
cggagttgtagtagaagcgttttcgatttcgtttaggtttttagtttatttttttttgaaggtcggtagggggcgttattatcgttggttttttcgcgcggtttcggttttcgtttcgggaatcgagtgtttgtagttcgcgattttggggaggtatagggttagggtatcgtttcggcggagaaagtggttgtgtcgcgcgggtggggtcgggttagggttgggttgggttggagggcgcggggtatttgagtgaagtcgtagttttcgggcggggtgtagaggagattttttgagcgttggagcggggagagttagggcgggggttaggcgtcgtagtttcggacgaggttcgagtagtttttgcgcgtttcgtagtaggtttagtagcgtgtgcgttagcgagcgtagttttgcggatcggataggagtcggagcggcggttagaggttggttaggtttttttttttttgtttttcgttcgggttcgggtgaatagaattgatcgtatcgtcgtcggcgttgtaggtattgttggtgcgttaggcgcgtataggcgttttgggatttcgggtataggcgggtatagaaggcgtagagtcgggcggcgtttgtttgtagtttttggggggggttttaggttagaagttttttgtagttgggttcgcggttggaggaggttgttgcgggcgggataggggttagtttattttttgtttggggttttagtttttttatttttttttcggaaggagataggttttttcgaggtagaagggagttgggaatgggtatgggtcgggtggaaacgggtttgttttacggttgttcgttggggtattggggacggggtattggaaagagggcgtttatcgtttatttgtttttggagttagtttttgaatattgttacgcgggtgtagatttcgggtttttttggtttttcgtagtcgtttttttaggaggtgatttcgaataggatttttttagggcgggggttaggtttagaataggttagggggtttttcgagttattttgcggggttaagagagaggacgttgtatttatttgttttttatgacgtttgttttacgtttggtaggtgtgagtttgttatttgtgtttattttagggatgaggatagagaggtttagagaagtcgagtgatagatagacgtggaaggaaaagaggtcgtagtggttttgggaaggtttagtcggtttttttttattagattgggtttatatttggtacgagttaacgtttttcgttaggtattcggcgtagagtatggtgttggggcgtagttcgggttttagggtttttcggtaggtgtcggtgttgagtaggggaatacgggttttttttattgttttagttttaggttcgtttgtagggaaggggtggaaggtttaggtttggagggtaagagtttcgttttgagggttttttttttattattttttttgatttttttttttttgaaagagtaggtagtatttttttaaggtaattcggtttttttatattttattatttcggatttttagttttttttattacgcgtcggtttatttacgtttagtattttcgaagagggcgttttagttcgcgatggcgtaggcggtttcggtagggggtttttggggtttttggggtaggtatacggggcgcgtcgattttttcgggtttatcggcgtttatagttgtattagggttaggtcgttgtggaaggttcgcgggttaaattgaggagggggaggcggcgtagggttaaggaagtacgggtgggggtgcggtgtttagttttgggggtttggggattgtttttttattttggggtggggtaggatgcggtttattggtatttttttcgtttgtttttttcgggatttttttgttagcgttatagtttatagaagtttattcggggcgttgcgggtcgagcggtagttgagacgtaggaaggataggggtatatttcgtaggtttttcggagattttgttttttcgttcgtatgtcgggttttttttatttgggggtacggagggcgggtcggggaggggtttcgttttagagggggcgaattcgttcggtcgtgttatttttttcgggttggtattttggcggggcgggcgcggcgttttgagatggggaagttcggggtcggtcgtcgttagggggtagtagagattatttttttcgcgcgtcgttcgtcggataattcggtaggtgcggggtttagcgtcggggattttagttgggtaaggtttgggggttttatttattttataaagtagtgcgttgtcgtgagtatttaggaggtcgttattaggacgtcgtcgtatagaggttgttcgtcgagttgtagttttattagttagggttaggtttcgggcggcgtcgcgttgttttttacgatgcggtcgtgggttcgcgttatattggtagtgttcggacgtttttcgtcgtacggttttagaaaggggtaaggggtgttacgagggatatgttttggttattttcgttttcgaggtttattcgg

SEQ ID NO: 11432 - DNA, 919 bp, Artificial Sequence
  Description of Artificial Sequence: Synthetic polynucleotide
cggtggggtgtgaacgggcggaagtttcgtttagtgtttgtttaattatttttagtttgtggaggtcgagcgaatgcgggtgtggggttcgggtcggggtatatttacgcgttgcgttggtatcgggattggatgtagatgagtaggcgtaggtggtttcgggggcgcggcggtttttttttcggcggtttttcgagcgttgcgggggagggtgggacgtggttaagcgggcgggcggcggggtgggcgatagagcgggcgatttttttacgtttcgggttttatttacgtgtagcgtggcggcgagagcgtagaagttagttacgggcgttttgtattggtcgttggttaagtttaggttcgggtcgcggcggaaggtattttcggcgtcgggttgcgaggggtacggatggttatttcggttttcgttcggtcggatttattcgttttttcgcgcgtcggtatttattaggtagtagacgttaagttcgtgtagcgcgcgtcgttttattaacgcgtttcggcgtaggcggtagaggaaagcggtttttacgcgcggcgttcgcggtttcggggttaggggcgcggttagtagtgttagtacgttttttattacgtcgtcgtcgtttttttcggcggtggtcgagatcggggcgaggttcgtagcgatcggttcggcggggttatacgtatagggttcgggtttcgcgcgttttcgttgtcgtatcgtatttggtatagagcgagcggtggtcgcgcgttagggattttttattcgttcgtcgcgtgggtttagttttgaacgataggtgttagcgagattaggggtttgtcgggcgtaggggtggggcgagggcgacgttttttcggtttgaagggtttcggagtttttgcgttttgattttgtagcggttttcgt

SEQ ID NO: 11433 - DNA, 2488 bp, Artificial Sequence
  Description of Artificial Sequence: Synthetic polynucleotide
cgggtcgagttcgaggttgttcggaggtttagggtttttatttcgcgatgttagttttgtttttttttgcgtttcgggtaagggtttgttcgtttgggggatcgtatttggaattcgcgtggttttttttttcggcggtgtcgtttttacggatagtgcgtgttcgggtttgggttggagcgacgttttcgagattattttattattttataattgtggttcgcgcgtcgttaggattcggttcggtgtgggttggcggagtataatgatcggcggcggggcgggggcgggtacgcgggcggcgggcgttgggggtcgcgtagatgtttgggtcgaataggtgagcgtttttcggatattcgggtgttcgtggggggcggggaggagggcggagggggtgtaaattaagtggtgggaaagagataaaggaagagtgaagagcgagacggtgcggatggggaagggggaggggcgcggaggggtagtcggtgggtagcgcgtcgaggagttcgagtttgaatttgattaagtattgggggttttgtcgtgggggtggggcgggggtacggtcgagagtcggttacgtgtttggtttttttagttcggggtttcgtttcggtcgttcgggggagtcgaatttcgaggttcggtagtttcgttttataagtattcgcgtttttggggattcgaaagacgtatgggggtcgaaggttgttcgaaggggtttcgggcgtcgagagtttttgagggtgtttgagttattttatttgggttaagttttttttttttggtttgatcgtagatagttcgtcgggtgttttttttttttagtttttatcggatttagagatcgtagttttcgggagcgatgggtaggtatagattttagcgtttttttttcgggtttagtttcgtgtaaggatttttttcgaagcgttttttttttaagagcgcgttttttatcgaagcgtacggcggcgcgtttagcgcgtttttatttttttttatttggtttagttttttttttttttttttttttttttttcgcgttttttttttttttttttttttttttttttttttgggtgtttttttttttttttttttttttttttcgtgtttattttttttttttattcgttttttcgttatttttttttgttgttttttttattttttttgtttgcgttttttttgcgtttttttttttttcgttttcgtttcgtgttcggtttcgttttttttttcgttttttcgtgttcggtgtttttttttttttttttcgggtcgcggcgtcgtcgtcgttgtcgtcgttgttcgtttgggttttttttttggttattttcgttttcgggtcgggtagtgacgcgtcgcggtggtgttagttttttttttcgggtagtcgcggcggtagtagtagtagtagtagttggagttgtggggttgttatcgtcgttcgtttcgtttattcgcggatttcgatcgtttattttcgtttcgtttttagtttaggtacggagttcggttcggatttcggcgatcgggtcgttttcggggttcgggtcgtcgtttttttttttcggttgttgtcgtcggtcgttgagttgcggttaggggggcgaggggttgggggcggttttggggaggggggcgtagggggagttttttttgtcggggttgagggagggggcgcgggggagcggttgcgttttgggtcgagtgggttggggcggggggcgggtgagtgtgttcgagagtggagggggggcgatgaaggttgtattgtgggggtcgcggggcgtttaagaggtgtgtttggttttgagcgtttagggtcgcggggcgtattttattttcggggtgcgcgtcgcgggttttggggggcggtgattgtgcgcgtagcgtcgcggtattgtgttacggtcgttcggtgtgtagcgggttcggtatcgcgtttcggcgagggaggcgttttttggcggcggggcgggggtcgggttcgggttgtcgcggtcgttacgagaagggaagtggattgtgtttggggatgtgaggacgggaagcgttgagtgttagggaggggtttttcggcgcggcgcggggagttgagacgcggtttgtagagttgagtttattttagtaggttcgggtttttttcgggaggggacggggtgttttttttaggtgtatcgtttgatcggaagtcgcgggcgttggcggtttttggcgaaggggttttttttaatgaggggatacggcggggcgggggtagtcggtcgtttcgagggcgcgcgtaggggttaagttggatttatattttcgtttttttttttttttttttattttgtttttaaggttggatattttggatagggaggaggggggagtgtaattcgtatttttattttagtcgttcgggagtagaagtgattttgtttttattcggagttgcgtttgttcgagttcggtcgtttttatcgggttgcgt

SEQ ID NO: 11434 - DNA, 513 bp, Artificial Sequence
  Description of Artificial Sequence: Synthetic polynucleotide
cggtcgggtttgttacggggttttgtgtagttttttttattttttcggttgttagcgtttcgtttcgtttttttttagtttttaagggaggaggggagagttgtagagaggaggaggggtcggggaggtcggttttataaaggcggttggaataattttgttcgttagatttcgtcgttcggattttttgagttgttcgttattttacgtgatcgcgtcgttttttagttttatcgttgagtgagttggggcgcgtttttatttcgtttttagtttttcgtcgagtcgcgtggtgtattgaagtcggcgtggggaggagagtcgatgaaggagaacgttaatatgggggttttaggtagaatttttaatgggagagatttaggatttgagggagtcgggagattcgggagtttacggtttggtcggttattttttttttttttcgggcgcgaggtttatgagatcgtaagttattttttaagaatgcgcgtgtagtcgttgtcgtggtaacgt

SEQ ID NO: 11435 - DNA, 1766 bp, Artificial Sequence
  Description of Artificial Sequence: Synthetic polynucleotide
cgttttttgtttattcgcgttaggtcggttttttttcggttttttttgtggcgcgagggatagcggaaattacggtagatagtatttttttgagtttaattttttttttttcggaggaagtcggttttttttttttatgttattttcgggttatttttggataatagttgttatttttatttgagtcgaagttaatttttcggggagttttcgggcgcgtataggtagttcggtttgttttgcgattgagttgcgggtcgcggtcggcgtcggtttttttaatggtaaatgtgtgtggttggaggcgagcgcgaggttttcggtaaaggtagtcgagtgtttgtagatcggggcgagttttgtgaaagtagataaaagaaaatatttattaacgtgttattacgaggggagcgttcggtcggggttgtcgtatttttcgcggaatatttggttttttttagtttcgagagaggagaagaagaaagcggaaaagaggtagatttacgtcgtttttagttaagtggatttgatcgatggtttttttgaatttattacgatatttgatttattagcgatgttttttggtttgtgtgttacgtatatatacgtgtatataaggttttggttcgtttttttttttcgtttttagtttttgggcgaattttatatttgttttaatttttcgtcgagggcgagtaggagcgagagtgtgtcgagtgagtgtgcgtttgtgtgtttcggcgagggtgcgcgttcggcgtcgggagcgcggttagtcgagttcggaggtatcgggaggtcgagagtcgtcgggattttagttttgcgtttattgtttcgttcggagttggatttcggggtcggggtcggggtcgtgcgtcggggataggtagggtcgggtcgcgggtcgcgcgttttttaggtcggaggtaaaagcgttagcgcgcggagggttcgaggagggtatcgcggttgggtttttcgcgtttcgggttttagtcgttcgcggttttcggttcgacgtttttcgtttcggagcgcgttcgttttttttgcgtggaggtcggcgggtaggcgagcggggggcggtagcgtcgtgttaaggggttggttggggtagcgtggtcggtcgggttggggcgatttaagagcggttcgggcggggtgcggagtcggattttggttggggcggcgcgcggggagggggtcgggggcggtggcggcggcgttggggggcggggaggaggtaggaggaggagtagtagcgttcgtcgggggatgtagtagcggtagcggcggcggcggcggcggtagcggtagcggcggcgcggagttttttgcgtttagcggttcggtcgggttgcggtagaggcggcggcggcgtttcgtttcgggtgaggttgtcggggtcgtgcgcgttggtgagtggggcgtggggggtaggtgggtggttgggggacgcggggttcgggcgggggttcgcggcggtcggagtttttttcggcgtgagttcggtcgcgagcgtcgtttaggtgagtcggggttggttcggatcgttcggttttagttttagcgttgtttgcggaggtgggttcgggcgggcgggagggaggtttcggcgtcggtcgttcgtagagggatgatttgtttgatttcgttggttggcgggcgggcgaggatttttcgtcgcgtttttgattcgcggatacggtatatcgagtataggcggtttcgggtaggggagcgcgtttgggtcggttattcgt

SEQ ID NO: 11436 - DNA, 6511 bp, Artificial Sequence
  Description of Artificial Sequence: Synthetic polynucleotide
cgtagggtgaataggttcggttaggagtcgtagcgtcgtttatttgtatttcgtttatttggtgaggtatgtcgtggagttttaggttttcggttaggttcgcggtatttagggcgtgtgcgtggggtagtagtaggtcggagcggcggtaggtatttttgcgggcgtttatcgcgttcgtttttagttcggagaggtggggtagtaggtcggtcgggcgttcgtggtgcgagggtagtttcgtttttttttggttttggcggtcgggttaggtttgttgttggttgtttgtgggcgtcggttggtgtagggggttgatggcggcggcgtacgttttttttagatgcgagtaggggtcggtcgattgggagtaggttagttgttggtagggagggggaaagtagggtggcggttgatattcggcgattttagtgtgggagaggggtggcgcggggttgtagaggtgttgttcggcggaggagaggtgggggattcgcggatttttattgttgttttcgtcgtggcgattttggagggaaaaaaaaaaataggagatttcgttagtgcgaaatttcgttattgcgaattggtcggtatcgtcgggttacgtagagggtttcgggggattaatcgtatttcgttcggcggggtttgtttagggtcggaaggtattcgggggtaatgcgtttcgaggatttcgttgtaagtaaagagtgcggggagggaggagagtttggtgaaagatttgggggaacgagtttttaaagttcggcggcgaaggtttaggcgttgtttttaagttcgaggcgtttggaggcgttaagttcgaattttgggttttgggttagaaaagttcgtggtcggagttcggggcgaaggagttagagttcggggcgaaggagtcggacgttcggtgtagagttatttcgtggagttcgtttatgacgtagggattgttggaggtggtagcgcggtaggcgcggatagagtgcgcggcgcgggaaatgcgtatttttttcgttttcgggatttttttttttacgttttcgggataaagattttcgagcgggcggcgttcggaaagtagggttcgttattttgcgtcgttttgggaagtgaagagggagcgcgcgtatagggcggttttttttgttggtcgggtttagtcgaggggagtaataagtgggggcgttttgtattgttaagggtagtgttttcgtacgtcggggcgtagagggggtatgaagaattttggaaattgggtagttttgttcgcgtacgttttttcgtttttgggcggttcgatttagtttttaaaggatgcgtttttatttgtttaggggtttcggggcgtcgggaatttggaggaatatggcgttgtcgttttttggcggaagcgttcgggtttgcgggtaggggtagttttttagggttcggaggcgtagtgaattttcgcgagttcgtagttcgagtttcgcgttttcggcgtttttgagttcgtttagcgttgtttgcgtttttttttttttttcgttcgtcgtttttttttttttttttatttttcgaaattttagtttaatttgttcgataggttggagtattcgcgagtttttacggttttatttggtttcgggtatttttattattattttttagtttttattttttttgaaagttaaatttcggttgttttcgtgttttttcgaggaggtagcggggtaggtgataagtcggttttggaggagtgttcgttaaggtgtcgttagtaggtagttttatttgatttttttggatagagatttcgtgcgtaaaagttacgtttgagggttgtagacggggtattttttcgagaaaacgggaagtagggttgtttgtcgtttaggaaagcgttcggtaagttgtgtgggtgggatttgttattttttttttaggtttcgttttcgaggggaggttatttaggaaaaggttttatataggaaaggggtttcgtagaaatggattaaggggtgttcggagaagtggatttcgttttatcgagaggttagggtttttatgttttcgttttcgatttcggtttagtggtttttgtttttcggattgttttcggcggggcggggttgtatttcggagttttagtttatttcgtagtttttttcgtatttgatattatcggttattttttataatatggcgttcggcgttttttaaaatagtcgttagttaaatttaggatttttttagtttttaagcggtaaatttaaaatcggggttacggtgattaggcgtttgtcgtcgttttcgtcgcgcgcgggttttgttgttcgggttattggatacgtatcggcggttttgcgagcgtagatgttgtcgtcgcgagtgttaagatcgtttcgcggacggggaaagtcgcgttcgaatagtgtgttttggcgatagtcgggggattcgagcgttttaatgagaaggaaattattataattttttttcgggggtcggcgcggaggtttaggcgtcgggcggggcggtttttagttagttttagtttagtttcgtttcgtattcgggtttggcgtagcgtcgagttttacgttgtgagggacgaagcgcggagttagtgggcggtgtttcgttgatagtcgaagatttgcgaggtttgggtttttcgacgcgttttttttttgttatttttatcgtaaatatatttgagattggtagagttgggggaagggatttaaatattgaaatttatttttttttcgtttaaacggtttttattcgtttttttaaaagacggatgttatttggagttaagaaattgcgtatttggggagcgatttaataatcggggtttttttattttttaaaaatatattttattttatttatattttattgaggtttaaggtttgagttgggattatgtagttggagttttagtgcgttagagacgtttagtttttttcgtgggtatagcgcggtttcggttttcgggcgggaggagagaggaagggatttttggggagtttgttttaagggtcgtagaggtagtagacggttttattcgtttaggagttgcggatagcggcgtttcgtcgttgtcgttcgaagtggtatttttcgcggttggttgaggttagggggaattcgcgcgtattggattagtttagcggttcggttttgttttgttttgcggaacgtcggttttgtagttgtttttggcgggtcggttatttagaagtttttattcgttttgggaaagaagcgtcgggtaggaataaaattcgagcgttacgggtaaggtgagggtgaggaggtgtaggaagttgggagagagtttgtagagagttttcgattggagaggtagatatttaggttttatatgtttagatagaaaacgaaatttttttttatataaacgttgtttttttttttttttcggtatttgttatttaaatttgaaagtaaagtgtaatattaatttttaaaatttaaattaacgaaattttttggtttagttattatgtagtaattgatttttattgtaaggggaatatcgttaattttcgagggcgtatttgttgggacgttttaattggttttttgggttggatttaaatattttgtggggattagaggataagattatttttatttgatattgaatacgattttgtaataattaatgtttattagtacggtgttcgtatttgtagtagatatgatttttttatttacggaatggcggtatttattgtttcgttgttttttttcgggttcgtttgaattttagtatttatttagatttaggtgggtttaaaagaaaataataataataggcgttttttaagggaaattttttttcggttttagatagtagttaaattttaggtgatttttcgatcggacgcgggaataaaatttggaagttgaaattattgagatttttcggttaagtatatttgtagggttttgtattaaggagaatagtgtataaaaagatatataggattttgatatttcggttttaaaataggtttttgggggtaaaataagttatcgtagaagtagcgtttttggtattagcggcgggggagggggatatttgttagaagtagaaattagatttaggttcgtaggtattttagagtataggtttaggaagatgggttttagattcgttagaggtgcggcgtttttttcgggcgtttgggattttttgacgggtgtcgttgggttgttcgatattttgggttttttagttttcggttttattttttgattcggtttgaggtgtagtttgaataagttgttttgtttgtgttggtaagtttattttttgtacgttggggttcggaatgggtaagaaggtgtttattttttattttaggttttggttttttttttttatagtaatattagttaaagttgttcggaggaatcgatatgttttttcgtttgggagcgtttacgtaggaggcgaagggagtcgatgggtattgagggttcgcgtagtatcgtgtcgtgggtttaaaggatttagaggattcggaatcgtttggtaaaggttatttatttttaaggagtttttttggatttcggcgttgttttttttttaatgggtaagcgttcgaattggagcgtaattttcgcgttttttgtacggaaggtagttagaataaattttttgttttttcggtacgggagatttttttttaatacgtatattttcggtttttgggtcggtatttaggtacgcgcgcgtttttgtgaggaagttttaatttttttttgattttaatttttttgtttagtagagtcgggaatcgaaggttttagtatttaagatagtttttttttaacgttttcgttttttgtttacgtgaagacgcggattgcgtggtcgcgtttaagatagtcggtatcggtagaaggggatttttttggaatttcggaggtttcgtagtcgtttggagaagaggatggaaggttgtcgggggtttttttttatcgttttttagggagtttaaatttatttattttttggaagttttggatttacgtttttatgaaatcgtaaattaggtttttgtaatagcgggagcgttttaatagcgcgttatttttaaagaggcgcgaggtggtgtttttggaaatagggttttcggttttaggtttgagttattcgttatttttgtttttattttagacggaagaaggcggttaggcgggtagagtaagattcgggtagatttgcgattttttttttcgttttagggaggggattttcgagtagaagatggaggttttcgagcgttttcgtagatttcgcgttacgcgtcggacgtttgtttcgtttttcgggataacgtgagcgtcggtagggattttagtaagtggtagattcgttaggattaagtaaggtggaaaggtcggggtttgcggtaaatttaggaggagggggtatttacgttcgttatttttttttcgcggtattggtatttattggatcgatattggcgttaaagggtattttgaagtatttatgtttagtaagggtatgttttggggtattatagatattaagttatagttattttaaaataattataaaaatgattatcgtaaataatagattgttttaatagggcgcgaagcggtcgtcgtatatagacgtttttggttttagttttattagatttagtttattgttcgtttttttgcgtttcgcgttaggtcgtatgtttttcgtttagaattttttgagttttaatttttttttttaaataatttttttttttaaataggtaaagtgaggcgaggagttgaggggtttataggtttttaagttttcgaggagggttcgggtttacgttagtttcggttcgttaaacgagatttcgtgggtatagtttttaatttgataattatttgttttattttatagtaggtaaaagtgaatttttagtcgtttaattatttgaaagttataaaggtgtttagggttgaaggttatttttttagcggttttattagggagttcgttagagatatgtttgattttttttttgttttgtttcgggggggattttcgttcgtcggaggttttatacgtttggtcgtgggatggtagatttttgttatttttttattaatatttcggagtttattcgtacgtattttaatcgttcggagcgtaggttcgaggattaaggcggtagtttcgtgttttttgaggtttttttcgtttcgtgttttgggtcgttatatatttttcggttaagttcggcgtttttaatttagaatttggtcgtttttaggcgtggagtaggttattgttgttagacgttgcgcggattcgtttttttgcgttagtattgggcgataggtagttcgggtagtatttaggagttattttgtacggttttaggcgttcgttttatttagcgttatttttcgtttttcgtagcgagttttttcgtagttttttttttttgttagttttcggggtcgt

SEQ ID NO: 11437 - DNA, 6511 bp, Artificial Sequence; identical to SEQ ID NO: 11436
  Description of Artificial Sequence: Synthetic polynucleotide

SEQ ID NO: 11438 - DNA, 338 bp, Artificial Sequence
  Description of Artificial Sequence: Synthetic polynucleotide
cggaaatttttaattcgcgatttcggcgggtgtatcgtcgagtttttcgggaagtgtagttttagcgcgagcgggacgttgggaaatgtagttttgcgcgtttacgttttcgatcgggtcgtgttcgtcgcggttttgcgaggttcgaggggtaagggagcgtgtagcgggggcgggattacgaggcggcggggttgggggcggtttttgtgtttgcgtcggggatcgcggtgatttcgttgcggatcggttcgcggtgattttagcgcgaacgagttggttgtcggttggggcgagaaaggtttgcggatcggtttgggcgtatgcgcggaaggcgg

SEQ ID NO: 11439 - DNA, 936 bp, Artificial Sequence
  Description of Artificial Sequence: Synthetic polynucleotide
cgtaggcgcggggtgttttgagttttttaatttttagagggaaggagtttatcgtgggggatcggttaaagttttattttttgttcggtttagggtaaatcggtttttcggtagtttagttcgtttagtttttttcgagaggatataggggattcggagttcgtaggggttagtattatttttcgtttcgggtttcgttttttatttttcgtcgtttcgagacgtttcgatttttagttcggaggtgagggtttttttttatgtacgggcgtttgatgggggtaggggtggggacgtacgagagttttaggtttcggttcggatcgttcggggttttaacgtttttttttcgggtttaggaatagcgttttcgtaggaagtatttgtttcggagggggttttcgggatgtatttcgtcgtgttcgcgttcgatgttcgtttttttagggtttcgcgatttttggggatttttcgtttttcggtttagggggtatttatttcgtacgtggagttcgggtagcgtttttagacgtatttagcgggatatcggagaggacgtcgacgtagtgtaacgtttcggtcgaagcgtcgaataatatgcgcgcgtcgcggaggaggtgcggggcgtgttcgtttaggtagcgggtcgtttcgacgtggtagaagtttaggaagtcgtagttcgcgaaggataagttttagtcgcgttttgcgtcgtatatggcggcggcggcggggcgggggcgcgggttaggatttgggtcgggatcgggaatcggttcgggttttgattcgtagtagtttcgttcggcgttcgtaagcgttttttattttgttttagtgtttcggttagggtatttttagcgcgacgttagtttcgtttttttcggattatgtaaatgagtcggcgggaggtttaatgagcgggtaggacgt

SEQ ID NO: 11440 - DNA, 2184 bp, Artificial Sequence
  Description of Artificial Sequence: Synthetic polynucleotide
cgttacgacggggattttattacgttgttttttatttacgttattcgtttaatttacgcggagggttttgagggttttattacgtagttttgaaggggtagagttggggttatataggtatcggaagtttacgttgtggttttaggagaaggttttggatgtggtttttatgagtgaagggtggatttatagcgttgtcggaataaagggaaattataggtaggagggaagcgcgtttaggattcgcggttatcggttttttagattgttttttggggttaggtcgcgaggagatggaaagcgggggtattataggttcgtttgaattcgcgcgtttattcggttatatcgattttaaatttttgtatgcgggtaggatttttggtttttttgcgtttattttagttttgttggtcgtcggggtatttgagggatggttgcggggggtcggagggtggaaggggcgtcgggtagtttcggtggggaggggaagaggtttttcgtgtattatggattttcgtattcgggaagggaggcgttcggggttggggagggaggaaaaggcggttgtgttcggggagggggtagcgagatttcgttcgggttacgggttgtaggatggagcggacgggaggaaggagttttgacgtcgcggattttacgtttgtcggtcgttttttttttttttgttttttttttttttttttttttcgtagaggtagcgcggggattcggtcggggtggggttagggcggtgcgtttcggagtttttaatttggattttatttcggaggcgtcgcgatcgcgttttcgtcgtttttaggaaggtgttcggatcgcgtcggcgatcggaggattttgcgtttcgtcgttttttattttgtttcgtttcgcgtttgtcggcgatttcgcggggtcggttttcgtttttatttgtagttcggggcgcggcgtttttgagggaagcggggttttgggatttttcggtttgggcgtgggatattttacggttcgtacgaattttggtggttcgggtttttgtttttttagaatagcgtttaggtttcggagaaatttttcgaagtcgtgggtttagacgttttcgggggatttcggtgggacgggtagggcgggcgtcgcgggcgaggggacgcgtattgttttcgggcgaattagaaatattttatatcgggtatttttttaggaatcgtttatttatttttattgttttttattaggttttattttattattttttttttaggtatttttttcgttgtatcgtttttacgcgggtatcgtttttattcgggtatttcggttttgttttgttttggggtggtcgtagttcgcggggaggaagcgcggcgaggcgtttatatcgggaaagtgttttcgtgattttgcgaggttatatttcgggtgcgtcgttgcgggttcgtgggttcgtgggttgtagtttttcgtttttgtcgggtggacgagtttcgggttcgcgtggagttgttcggttaaggtcggttcgggaggggcgcggcgtagggcgggtaggggcggggttttaggttaacgtttagttttagatttagtttcgtcgtcggatttatcgtgtttttgtttttttatttttgagaaatcggaacgtcggcggtattttttttttcgggtcggagtttgcgtttttcggattgcgcgtttttgtttaggcggcggtcgggggtgggagcgcgtagcgggttaatttttttaaagggaattgtcgggagggcgtttagaagggaaagattaggaagcgttgggtgttgagttggagtttggtttttttttgggggatcggggagggggttgaaggtggggagaagatcgtcggggttgttaggggggtattgagggagcgtttagggggagaattttgggtgggcgacgtcgtaggggagttgtttggtaggggcgagggtttcggggaagtggagtttttggtcgagagttgtatttgtggtcggggagggaaagggttataagggtagtgcgcgtcgggagggaagtttaggtcggggggaagggattgcgcggcggggataggtgcgtcgggtgttggatagtgagtaggagttcgtcggtgtttaggttacgaaggtgttggagtcgggggagttggaacgtaagggggttaagggaacgcgt

SEQ ID NO: 11441 - DNA, 413 bp, Artificial Sequence
  Description of Artificial Sequence: Synthetic polynucleotide
cggtttgacggcggggtcgagtaggggaagtggaaggatggagggagaaagggagagagttttagtcgtttcggttgtggtaggaggagttttaagagcgtttttcgagttcgtttcgtatttttaggtttagttcggcgtaggttttttttttcgttttttttattttcgttagttgttgaaatttttttatcgttttttcgcgggtaatagtgttcgttaggcgtcgtcgcgcggtgtttcgttttttacgtcgttcgttcggaaagagttcgtagtggttcggggcgtcgcgttttgatcgacgtttttggggtttgggagggcggcgttgagagttgggagaggcgttgagtttttcggtttttacgggacgtcgggaaaggagagcgagcgtaatttttacgtttcgg

SEQ ID NO: 11442 - DNA, 403 bp, Artificial Sequence
  Description of Artificial Sequence: Synthetic polynucleotide
cggttcgcgtcgtcgtgttttttattcggttatatagcgattttaaaagtttagtttttatttcgcggagatttcgatagttttgggaggttttttttaaaagggaatttggagaaatttgttgttgagtacgattgagttttattttataaaatatttattatttcgtcgttattttttaagtttacgtttttaaatatgcgaattttaaggtttagttcgggagtaagttaattttaggattcggtttatcggcgcgtgttttgaaaagaatgtcggaggttagatttttttttatcgtttagaggtttcggtttagcgtatatatttggggttcgtagggttttcgcgcgtcggaattcgatttgcgttggattttttttcgggcgtaggagttaagcga

SEQ ID NO: 11443 - DNA, 675 bp, Artificial Sequence
  Description of Artificial Sequence: Synthetic polynucleotide
cgttttatcgtattttagtggagtgtcgcgaagttgtaattcggttttaaggcggttcgtatttttattcgtatataaaggtaggtcgtagtttcgtacgcggggatagggttagtaaggggcggggattttcggggtcgtcgttttcgtagtttcgcgtgtgggattttggggcgggtcgttattttgtggtgcggtcgtcgtttgttaggagatatttagtaatttcgtagcggttattttttataagaaattttcgttgtaatcgttgcgttatattatcgcgttttttagggataggaaagttttttcgtgtttggtgaagttttaggggaagtagttattttgtcgtcgtatacggtaaaattttttattgtcgtagtcgttcggttgacgtgataagggaggtgtaggttaatacggcgatttcgcgttttttggcggtagtgtcggagtagcggcgttgtttttgatttattcggtattcggttttcgggatcgtttggcggttgtgaatgtagagttggggcgacgtggggttcgttttttgggattgggtgtgagtttgcgtagtgagttatatgggggttatggtttggcgtgggggcgtggtcgggtggggtcgttggatttggtgttggaaagttagggaagtagtcgtgcgtttaagaacgg

SEQ ID NO: 11444 - DNA, 580 bp, Artificial Sequence
  Description of Artificial Sequence: Synthetic polynucleotide
cgaagagttcggttaataaagtaaacgtttcgttttcggttttttttttttttgtaggggaaacgaattgaacgtttgaaacgaaggtggcgcggtttggataaatttgatttttcgatatttttcgtttttgcgttcgttttcgttaagcggggaggagcgatcgttataatggattttttcgtaggttttgtgcgcgttgggaatttagttgtcgtcgtttcgtagagttttttgttttcggagggcgtttattttcgggtcgtttattattcgcgtagtatcggtagtcgttgtttcggtagtttttagtcgtttcgttcgtttgtggttaattggttttagttatttttcgaaatgttagtcgattttattgggtattggaagatgttggttaacgagaatttcgaggagtatttgcgcgttttcggtaagcgttgttcgttgcgttttgggcgtttcgtcgagtagtttcgggtcgttttttagagttttttcgagacgttgtttgtttgtttttatttcggcgagtcgcggttcggtgttttcggacgttagaaagggcgttttcggttatcgt

SEQ ID NO: 11445 - DNA, 858 bp, Artificial Sequence
  Description of Artificial Sequence: Synthetic polynucleotide
cgggaatatcgttttttcgttagattttcggcggtttttttttttttttttaaatttatttttaaagttaagtgtaggttttttcgttttagttagaagcgttgcgtgagtttttatacgtagtcgtaggtagttttttaaatagcgttcgcgttgagtaaatagtttagacgtggggtttaggagggcgagttgaggcgatcgtatcgggcgcgtagcggcggcgggttagtcggcggttaatagttagggcgcggttcgtttcgtcgttttttttcggggagtttataaggttttcgtagcgtttcgggcgtttgttgtttcgtgtttttatcgacgattttatttagttgcgttacgcgtcgtttcggttgtcggtcgcgcgttttgttcgtcggttttcgttcgtaatcggcggtttagggcggattcgggtttttgcgttttcgcgagaagcgcggcgttgcggggtcgtgggcgtttgagttcgcgcggttttcgagggtcgaatatggggggatgtacggtgaagttttagttgttgtttttggcgttcgttttttatttttggaatttttgtttgggtgcggattcggagaagttttcgagtatttttataggtgagtatttcgcggttcgtcgttgtttcgcgaggttcggtcggcgggggggtagtttatttatttattagttttttcgcggggttggttaggtgagtagtgggggtttgttttttttttttaggatcgtcggggttttttttagaattgcggtcgggcggcgttggtttttggggaagtgtaggggtattcgttttcgttgattttttggagttttcggtgaatttagcgtgttcga

SEQ ID NO: 11446 - DNA, 5715 bp, Artificial Sequence
  Description of Artificial Sequence: Synthetic polynucleotide
cgttcgtatcgcgtatataggtagtggacgttcgtttatttgttcgtttgttgggcgtagggcgtttttggggtggggagggcgtttttgtggggggaaaaggggcgtttttgtttcggagggggaaaggacgtttttgtggaaggaagggggggtttttgaagcggtgtggtgagaggacgttttcgaggaaggaagggggtgtttttgtagcggtggggggagaggacgtttttgcggaaggaaggcggcgtttttgcgggggttggagagacgttcgcgcggtttttcggtttagggatcgttggttcgcgggttcgtttttttttcggcgttatggaaatcgtatttttttcgtttgtcgttttcgattttttttttttattattttttaaacgcgattttaatttttcgataagttgataagtgaatggcgtagaggacgtttcgtaaagcgttcgcgagcgggtgggatataggcgtttttttcgcgtttttttgttttttacggaagggcgcgcgtcgttttcgatttggagcgcggtgttcgcgaattcgcggtcgcgggttttggaattttttcgcgtttcgcggttgcggggggacggagatgcggtcgggagacggggacgggaaacgggggacggggatggggcgcgtttatttcgagcgcgggagcggtcgttttcgtttaaaatggggatttcgcgtttcgagagtacggttcggttcgtcgtttatgtttttattgtaaggtcgtagttttcgtcgtcgatttcgatttttcgtttcgtttagtcgcggtttcgttcggcgtttttttttcggtggaagtttaagtttaattaattgagttcgaggcgggagggaagggttttgcgcgtcgtggttcgtttcgtttttttttcgcgttttttttttcgttttgggtggtatttttttcgtcggtatttataataagtcgttgattaatgaggtcggggtcgttttatttcgttcggtcgggtcggggttttcgcgggagggggaggggacggcgggaaacgcggttcggggagaaaggggggcggggcgggggcgcgcggttcgttttcgcgagcgtcgcgtcgattggtcgagcgcgtcgttcgtcggggggcgcggcgttaatgcgaggtagcggggcggggcggtcgcgttgtgtgtgtttgcgtaacgtcgagttatatgttgttttgttttttttagtttagttattcggtgcgcgatgtgttatttattgtgcggcggggatcgcgacgagttcgggtcgtcgttggtagtagtagtagtaatattagtagtagtagtagtttcggcggcggcgcggatttcgagcgttcgggcgtatttcggtttttcggagcgcgacgcggcggtagtagtttcggtgcggtcgcgcgcgttttaggttcggtttcgcggttcggggatttcgattttcggtttagcgagcgcgtttttcggcgtcgttcgagagttcgaggaggtagcggtcgtaggtagtcggggaggggggcggttatcgttcgcgtcgggtatttttaggagttttagagcgcggagggcgcggcgtcgtcgagcggtgttggttttcgcgggttttttcggattttttttatcgtttgggttcgagggacgcgtgatcgggcgggcggtcgggcgtaagggtgggagggagtcgttttcgttcgcgtttttttcgtttttcgttttaatttttgggcgtcgggttcgggtcgcgcggtttgaagcgttcgcgatggcgagttcgtcgcggtacgggtcgttcgggtcggcgagcggagacggttttaattttaataataataataataataataattatagcgtgcgtaagtgcggttatttgcgtaagtagaagtatggttataagcgttttttcgtgttgcgcggattcggcgcgggcggcgacgaggcgacggcgggcggggggtcggcgtcgtaatcgtcgcggttcgagtattacgagagcgagaaaaagtggcggagtaaggtaggcgcgtcgaaacgggtgatcgttttcgattgttgtttgaatattaataagcgcgtcgacgttaagtataagtatttgatcgttttttatattaaggacgagtatttcgtcgtggtcgtcgagaacgagtaggagtaggagggttggtatcgcgcgtttatcgatttggttagcgagggtcgcgcggtcgtcggagacgcgtttttcgtcgtcgcgttcgtcgcgttttgtagcgtttttttgttcggcgttttgggcggttttgtcggcgtcgtcggggtcgaggatagttacgggttggtggttttcgttacggtcgtttatcgtgaggtgtggtaggtgaatttgaagtttaagggtttgggttagagtaagaatttgacgggggtgtatcgtttgtgtttgtttgcgcgtattatcggtttcgtgaagtttaattgcgagtagtcgtcggtgacgttgtagtttatgaatattcgtcgttgcggttattcggatagttttttttttatcgaggtgggtcgttcggtcgttataggtttcggcgagttgtggatgtaggcggacgattcggtggtggcgtagaatatttacgagattattttggaggttatgaaggcgtttaaggagtttttcgagtttcggtcgcgtagtaagagttaatcgtcggggtcgtcggttacgtattttattagcgttttcggcgcgcgtcgttattattatttggttaatttgttttttagttagacgggtttggtgcgtcgttcgcgtatcgatagtttggtcgttatttcgtcggcggttaagtgtagttcgtgtcgggtgcgtatcgttagcgagggcgacggcggcgcggcggcgggagcggcggtcgcgggcgttaggtcggtgtcggtggttgggagttttttgagtttcgggtcggtgcgcgcgtttttgagtcgttcgtatattttgagcggcggttgcggcggtcgcgggagtaaggtggcgttgttgtcggtagggggcgcgttgtaatatagtcgttttatgtttatgttcgtggcgtattcgtcgttcgtcgttattagtttcggttttttgtcgtttagtagcggttacggttcgggtttttattcgtcgtcgttcggttcgtattcgtttttgtcgtattcgttgtattacggtttcggttagcggttttttagcggtagcgttttcgtttcgggtttttttagcgatttcggttttatgtttttggacgagtacggttttagtttaggcgatttgcgcgttttttgtagttatcgaagtaatacgttcgagtttatcgcggagacgttttcggttcgagacggcggcggcggcggtgagttttacgggtatatgattatggataggtttttgagttattgtggtcgtttttatcgtcgggtttcgggggacgcggtttaggatttggatcgagggttgcgtaagaggatttattttttgattacgttagttcggtagcggtcggtgttttagtttttttttgtttcgttggatgaatatattttgatgcgggttattttttcgggtagcgcgggtcgtttttgttcgttttgtttcgcgtttttttttaaggtggtttattatttttatttagaggattacggagatatcgagatcggtttttataggagttttagtagtaatttgggggtagacgacggttatatgtttatgacgttcggcgcggttttcgcgggtagtgggagcggtagttgtaggagcgacgattatatgtttatgagtttcgttagcgtgttcgtttttaagtagattttgtagtttagggtcgtcgtcgtcgtcgtcgtcgtcgtgttttttgcggggtttgcggggttagtatttatttttgcggcgggtaggatattttcggcgagcgggggcggttataaggttagttcgttcgtcgagagttttttcgaggatagtgggtatatgcgtatgtggtgcggttttaagttgtttatggagtatgtagatggtaagttgttgtttaacggggattattttaacgtgttttttagcgacgcggttattacgggtatttcgttcgatttttttttcgtagttttgtatttcggcggggagtcgtttaggggcgttttcggttgttgttatagttttttgtttcgtttttataaggttttttatatttgtggcggggatagcgattagtacgtgtttatgagttttttcgtggggcgtattttggaggaggagcgtttggagttttaggttacgttagggtttagttaggcggttagcgttttcggggtcggttttacgtagtttttttattttgtagtgttttcgttcgtgcggtttagcggcggtcgttcggagggttttttgggttagcgcggtcgggcggtgaggtttacgcgtttgtttttggaggggttgtttagtttgtttagtatgtacgagtatttattgttatcggagtttaagagtttcggcgagtatattaatatcgattttggcgagttcggggttcgtttgtcgtcgttcgcgttttttttgttggcgtcggcggtttcgtttttttcgtttttgttcgttagtagttcggtttcgtcgttgggtttaggtatttcgggtattagtagcgatagtcggtagcggttttcgtttttcgattatatgaatttcgattttagtttttttaagttttttaagtcgggcgtttcgagcggttatttcgtgggttttttggacggttttttgtttttcgaggtttttttttcgtattcgtcgttgttttcgcgttcgttcgcgttttcgtcgtcgtttttgtagtcgtcgttatcgtcgtcggtttcgggggagttgtatcgtttgtttttcgtttcggtcgttgttatcgtttagggttcgggcgtcgttttatcgttgttttcggatatcggggataatggtgattatatcgagatggtttttggtgtggtcgttatttcgtcgtaatttatcgcggttttttcgaagttagaagttgttcgcgtggttagttcgacgtcgggcgtgaagaggttgagttttatggagtaggtgtcgggagtcgaggtttttttgtaggttagttagttttcggatttttatcgcggcgttaaggttattcgcgtagattcgtaggggggtcgtcgtcgttatagtttcgagatttttttttttattacgacggttattttcgtgttttcgtttttcgtttataattttaagcgttataattcggttttcgtggaaaatgttttttttaggaaaagtagcgagggcggcgtgggtgtcggttttggagggggcgacgagtcgtttatttttttacgatagttgtagtcggcgttttttttggtatcgtagggtcggtcgtggatttcgggttagttcgggggtttggtcggttgttttgggagcggtggatcgtttatgcgtagagagatttttgtcggtttttagaatggttttaattatatcgttatcgacgtgagggaggagttcgggttgttattttagtcgtagtcgtcgtcgtcgtcgtttttttagtcgggagataagagtttttggggtcggattcgaagtttcgggggttttattagcgttgtgggcgtcggtagtatcggcggcgggtgcggggggtcgggtttcgg

SEQ ID NO: 11447 - DNA, 858 bp, Artificial Sequence; identical to SEQ ID NO: 11445
  Description of Artificial Sequence: Synthetic polynucleotide

SEQ ID NO: 11448 - DNA, 247 bp, Artificial Sequence
  Description of Artificial Sequence: Synthetic polynucleotide
cgggtattgtttgtcgttagtataacgaagaaatttatatttacgaagattttagattttacgtgattatattatttaattattagcgttggtttggaggaattcgttgttacgtgatcgttcgtgtttaatgatcgaggtttacgttttttagatcgttatagtcgttgttatagggtttgagtttgggcggcgtttcgtttcggtcgtacggtgcgtcggcgttaatttttttcgaaggtttcgg

SEQ ID NO: 11449 - DNA, 224 bp, Artificial Sequence
  Description of Artificial Sequence: Synthetic polynucleotide
cgtcgttaagaaggaggaggagcggtaggaggcgttgcgttaggcggaggaggagcgtaaggttaagtacgttaagatggaggcggagcgcgaggtcgtgcgttagggtattcgagataaggtgcgcgtcgggtcggtttcgtttgcgggaaggcggttttgagtttagcggggatttagatttcgtttgggtggaaggggttgttcggaagaggggcgggcgt

SEQ ID NO: 11450 - DNA, 1174 bp, Artificial Sequence
  Description of Artificial Sequence: Synthetic polynucleotide
cgatgtggcggggtttgggaaatgcgttcgttggagtatatcgtagtttcgcgggttttcgagcggcgcgcgcgggtcgaggatttttagggtttttcgcgggtttttcgagcgtcgtcgtatcgtttttgttcgcgttcgggatcgtttcgtgggtttttttgttagggtcgtttgcgtcgagaggtagtttaggttttgtcggggacgtacgggttttatttttgattttttagtcggagttttttgaggatttgtaagtatataggttggagtcgagaggttaaattaggttttaggggatttttttaataaaattttaaattttatttaggttgttcgtaggttaagcgattgtaaggattttgagtcgaagtagcggtgtcgggtcgattcgaggttcgttttttatcgtttttttttcgggtcggttttgtgtagttggggttttggaattcggtttttttcgggttgtcggttttggggtttggtgttcgttatttttttttttcggaggtcgttattgtttttttattttatttttagttttttcgtttttttttacgtttttttttcgcgtttttttttatttgaattttttttttttttcggttggaagaaaagtcggtaatgagaaattagtttagtgttagtcggaggaggggggtagataattttagagatatacggtaatggagagagaatttattttgtgtaaagagggtttcgagttattagggaatttttggattgttttaggttgtcgtgtgtgatgtttattacgtcgtgcgaatattatttgttcggtattgtgtttttagttgttaggttatttgttgtacgtagtaatatttgattgtttggttttacgttcgtagcgttcgtttagacgcgcggggcgggggtcgcggaggggcgggcgggagttttgattaagttatttgcgaggggagggggcgcgggcgtagcggcggtcgggtacgaggtcgggttgatattattatttgttggggcgcgggaagaacggtagttgttttgcgttgtttcggcgagggacgtttggaaaaggttgaagttttgggcgtttttaagttcgttatttacggggttttcgttattttagtttgttcgtcgtcggtcgttttttgtgattttttgttttttggttcgtcgt

SEQ ID NO: 11451 - DNA, 8657 bp, Artificial Sequence
  Description of Artificial Sequence: Synthetic polynucleotide
cgagacgcgtcgattttttcgggaagcgcgagcgcgcgcgtgtttgcgtttttgtgcggatttgggtttgtcgtgcgcgtgtgtgtaaaggtgaaacggcggcggagttttaaatattttattttcgaattattttttgttgaggaattaaggttgttaggtcgttgttgattttgaagagggttttttttaattgcgatttttttaaggaattcggttttgtttatttttaaggaatgttttttttttttattttttagacgttgtaggtttttcgcgttgcgtttttttttaggttggagtcgtagttggcgggacgcgtcgtttttacggtatgtcgggtgagagtcgtttacgagcggtttagcgtggcggatttcggttttgagtcgcgcggacgtttggttacgaggggttttcgattcgggcggggagaggtgcgatttggggggagggggcggggcgcgtaggaaggaggaggagagagaaaagggcgaagttagcgcgagattaggaaggagaggagggtagagacggagtcggcgagatgttggagaatttaggattgtgggtattttgagcgggagagaaattttaggaagtacgtcggaggcggggtatttgtgggaggaaggtaaattttgtagagcgttaaaggatgtcgggagggataagttagttatggggagattttttagaaattcggagttgaaaatagggtagttaagtaagtaagagttggttagttgaatacgaggtttttagaatgtaaattataaataagaaagaaagaaacgaaagaaaaagaaaagagcgcgcgtagggtttcgggtttaggcgtttagagtagttcgtgcgggggttttttcggtttatagtagtcgtcgtttcgcgtttttgaagtggcgttcgcgtggttattcggggattttttaggtttcgggggtttatttgaaaatttcgagaggttttgtatattttgttaggattggagttgcggggattttttagttttttacggatgtttttttgtacgtgttttttaggaaaatatttaggtttcggaagcgtttttgagagtttagaaatgtcggttgagcgtgaaatttagtttaatttatttatagagtattagatttagaaacgacgtttgaaagagatgtgggttttatgttgatttaaattttgttttatttataataacgtttttgtttttaaagaaaagaaaaattttttagttaaattttttatgttttcggttttttgtttttgtttcgttttttttttcgataaacgcggggagttttggaacgggagggtcggtgatcgcgaatacggtagcgatgtgatttgatgtattgaaattatttatatttttaatgttattttattaaaggaaatttatataaaagcgtttgttttattttaattgttaaaaaagtttgttatattttcgaacggtaattgttttttcgttagatatcgaaagtttataaggaattataatgagaaaggattaggagtcgtttaggttttattgaaatgtttcgatgtcgtttttttttttttttcgaattaagtcgtcgggggaggaggtgggtcgcgtttatcgttgtcgggattcgggtcggtagatacgggttatagcgttttttcgtcgttcgcgcgtacgatttttggtttgcgtcgttttttttcgttttcgcgatacggaggacggcgtcgcgttcggcgagcgtttcggtttttttagtcggtcgcgttttcggggagatttcgagttcgagttttcggggtcggttgtttttcgcgttcggtttcgtaggaaattttcgttcgttgaaatttgcgtgtttacgtagattcgttttaaattttttggttgttgtagggataataaagaaaaatagaaatagtgttaattttttttttattttttagggtatatttaggaaagggggtagggtttattaggaatttgaaattgtttttatcgtttgggttattgtgattaggggtcgcgtttgtaaagtagttattgggttttttttgcgtgtttgtttatttttttttttttgttcggacggtaattgaaaagttttagaagttaagtgtcgggttttttttagcgattttataggtttgagtatttcgtttcgtttttgagtaaaatattttaggttttttttttcgggagtcgcggttttgtagttttcgtggtttcgagacggagtttgggttgagttcgttatttttttaggtagtttcgtcgggatcgtcgcgttaagattttacgttggtagtatgtttttttatgattgattttttttttttttaagaagaagattaagttaattttaatttaagaagaaggaatgtgatttttttttttaatattagagagttttaaagtaaaacgtagtttatatattttaataataatgacgagtgttaagtttttaatgtttttgcgtaggtattttaatttgttatagttattattaataaaaacggtatgtagtaagagtcgattgtttaatagtgtaaggtagacggtttttattagtaataggtagtagcggtatggaatatatagattttagtggaggagtataattgttaaggggaaaatatatataggacgggaagaggttatttttaaatttttaatattgagttaaagagggggaagggtaggcggcgtttttggagatgtattttgggtgaggggatttttttcgttattgtacgtgtttggttatatatttaattgatgttagaatcgattgtatttagagtagatattttagttttaaattgaggatgtttgtataataattggttgtttttttttttgtttttggtagaggttcggcggggggaggggggtgggttaagggagggggagggaggatgagttttaaatgttaatgaaattatagcgggaatcgttttttagaaatggaaatattttaggttagtgttttttggtgataaaaattatattcgattttttttttatttaaattgatttgatcgtaaaggaattttaaaggttgttatttgatttgatagtgtttgtgtttgttatttagcgtgtgggttttttatttatttttttttttggaggaatttttttttaggaagcgtaaaaatgtcgtagattgtcgacggtttgtttaattcggttgttttttttttttttttgttttttagttttatagtaattgattaaaaatatttgttttggattgaattaggatgttttatgtggagtcgtaataaggttgaaatttttcgttgggtcgttgtagggggtttagtttgtgggaacggggtgtttgtgggtggagggagaggtggtcgtgggtgtgtgtgcgtgtgcgtgtgttgagatggtttgaagaggatgtgtgtaggatgggggtgtggtttgtaggaagagtggtgggggagtagtgtgggcgaaggggtgggtgggataattggtagggggcgagtggttcggttcgggagtttttggcgggaggggtaacgtgtttggatcgcgtttatcgggagtttgtcggtttaggaggagttatttttaagtatagtattgtagtttgtaattggtttttttgtatttggggaaagatagtttgatgtcgtgagtgttttttttgcgttttggattagattggtaattcgggtttcgtttttttcgcgtcgttgtagtcgtattatagggaggtcgtaatatgttttgcgttttgagattattaaggttgtttcgtaggttgtagggttagtaggggtgtaggagtcggttgtaggtttgagttgaggttcgttttaggttattgcgtttttttttttttatcgtatttattcgagacggttttcgaggatagaggtatttgttgggtgggtgtttttaataggttagtatagatttgatatttttttatttttttgagcgttttttataggtgatttttcggagtgggtagttagacgtttttttcggttattttcgagtggaaaagggttggagaagcgtgatggggagagggttttaggaagttggggttttaggaattttcgttaatcgtttcgtttttgagtttcgtaaggtaatcgtttttttattttagtcgcgcgttatttgagttatttgtaatgtttattgtatcggcggcgttaatttgagtttttgttcgttttcgacgtgattgggaggttttaggttttgttagaggcggtttgttaggtaataattatttttttagtgttttgataatataaatttgaaagaggagttaatttagaaaaataaaataaaataaaattttttaggggacggcgtttttttagttgaagttttggcgttatttttaatagtggaaagtcgtaacgtttagggtttcgggggttgcgttgcggatttgggggtagaaagtttattttagggtttttttggtaattcgtaattaaggcgtttcggatttaggtttatgttgggcggagtggatcgcgaggggtaggcgattagacgcgaggttacgcggggagtttcgggttaggaggtagagtaggttcgggatcgtggaagtgagagtcgcgcgtattgttcggaggaagattcgagtcgcgggcgttattattttgatttttttatttttttgcgattttcggattggatataggggtcgggttttttcggggtgtatagcggggtaggttgtgagttttttaattggattcggtttggtttgatcgcgggcggtttttgtttagtttgtgagggtggagaagggggtgggggcggggtagtggttggaaggggcgggggtcgggtaggggcgaagacggtggtcggggacggtgggagtcggtcggagtcgggtaggggacgtggtttcgagtggatgggagtgggaggggtgcgcgtcggggtacgtagcgcggtcgggttgggttgtaggttcgcgagtcgcgggttggggtcggagttgttagagaggcggttgcgttataaaagtttgtcggtttttttcgtcgttcgttttcgtcgttttcgttttttttcgtttttttttcgtttttttgttttttttttggtcgcggttcggaggttgtagcgggcggagtaggggaggggcgggttttcgaatatgtagatgagcgcgtgatggatagttgcgcgttttaatgtttttcggaaattcgagcgttttttttttaattttttattttcgattttagatttttttaaatttcgatcgtcggtttggcgcgcggttgcgtttatcggtttcgcgttgttgtcgtcgttatcgttatttcgtcgtcgtttcggttcgcgggtcgtttaggttagtattcgggtcggtttgttttcgtcggtcgttcgggtgttcgtcgtcgcgtcgcgtttcggtcgggcgtggatggagggcgtcgcgcgttttgttcgttgttcggcgtgacgcgggtttcgcgtttcgcgtttattatgttttattcgtagggttatttgtattaggcgttcggttcgttggcgttttattcgtgttcggtttacggcgcgtcggttttggcggtttcgcgtagcgaggagttggcgcgttcggcgtcgggttcggcgtttagtttttattcgggttcggcggtttttacggcgtaggcggttatcggtttcgggagttcgttgtagtattcggtcgacgtcgtcgtcgtcgtcgtcggtttttcgttttatatggtaatcgggcgcgggcgggacgcgggatttttgggcgtcgggatttagacggggtttaggcggagcggggttcgggttcggcgggcgggggtcgtcgggaatgtggcgcggttggcgatttaggagtcgtcggttcggttggtcgtttcgtaggttgagtcgggtttcgggtggggagggtagcgcggtaggcggggacgtttttgagttcggtcgggattcgcgcgtttttcgcgcgttttttcggttcgtcggttgattttttttgagagtttgggaagtgcgttttcgtcggggtcggggtttggcgtcgtttgtttttggttttcgtatcgtagtttggggaggcgttcggagcgggttgtgtgttcgtttgtattggcgtggggcgcgagggttcgcgttattgcggtttttgagtcgacggtcgggcggttcgtatttattcgcggggtttagggcggtgggggttatcgagttaggtttaggagtcgagtatttagttgcggtttcggagttcggttcgaggcgtttaggtttcggttttattttgtttagcggattatgtttttaaatatcgtgtttgcgggcgcgtgattcgttaagggtcgtttgagtttttcgtggttcgagcgtagtttttgtttcggcgatttgggggcggttcgcgagtttcgaggttattgagttgggttaggttcgggtcgcggcgaagtacgttacgggcgattgaggttattacggggttgtcgcgattgtcggttttcggcggaatttttgggtagcgatcgagtcgttggggttttggcgaaggttgtaaatgtttcgaatttaaacgttaaaggatgaattaaaatgttaattacggcgtatttgaagaattcgaaacggtgattggtttttgagttgtaaattggatttgtttagttttagagtagtgaatagtgaattgggggttttggggtgtttttttaattatataagggaggggaagagggagtagggggaggtagtcgtattttaagtatttgtagaaatttagatattaaagagttatttgtgggtttgtgtgcgcgtacgtgtaagggtttgtgtatattgttacgagcggtttcggaatatttaggggaagatgggttattttaggaaagtgaaatagtttagaaattcgagaataaaatttcggtattttttgtgattaatagttggtttcgaattatattgcgttttttttgtttttttgcggcgggaagcgtagttttagagttagatttacggggggaacggtggtcgtgggcgggcggaggggtggtattttttggttggttgttcgcggggttttcgtatattttatttataggtttttgttggttttagggcgtattttacgacgcgtatattatcggtatgatcggcgttattagttattattcgtacggtagcgcggtttattcgtattagtttaacgatttcgcgtatcgtaagaacgttacgcgggacgttacggttatttttaaggtttggtttaacgagtatcgtaagaatttttattttattaagggcgagaagattatgttagttattattattaagatgatttttatttaggtttttatttggttcgttaacgcgcgtcggcgttttaagaaggagaataagatgatttgggtttcgagaaataaaagcgaagatgaggacgaggacgagggcgacgttattagaagtaaggacgagagtttcgataaggcgtaggagggtacggagatttcggtagaggacgaaggtgagcgggtagcggtcggcgtaaggtttcggggcgttttttttttaggcggggcgtagagttaaggcggggaggacgttgttcgtcggatattttaggttcgggtcggagttttagtcgtattatattgttttggggtcgtcgggatttgagcgagcgatttttcgggtttttttcggggaggttaggtttcgtttgttacgtggtcgggtgggggcgaggtgaggggtttcgtggggagggtttagtgtcgtaggatagggggcggagggggttttaggtgtttgcgttgttttttcgtgttatttatcgtgttcgcgtttttatagggattagtttgtacgtggattcgtttacggattattcgtgttcggtcgagtcggacggggagaagttttcgtgtcgcgtcggggattttttgtgcgaatcgggttcggagtgtaaggataagtatgacgatttggaggacgacgaggacgacgacgaggagggcgagcggggtttggcgtcgtttaagttcgtgatttcgtcgtcgtttatcggtttggaggcgtcgttgttgagtttttcgttcgaggtcgcgtttcgcggtggtcgtaagacgttttagggtagtcggacgttttcgggcgcgtcgtttttcgttagtaagtttaagttgtggtcgttggtcgagatcgttacgtcggattttaagtagtcgagtttgggttcgggttgcgggttatcggggttgttcgcggtcgtcgcgtcggttttaatcggggtatcgttaggaggttcgttttattttgtttcgtcgttgttgggtcgttttttttattatacgtcgtttttttacggtaattatataaattacgggaatttgaacgcggcgttgtagggttagggttttttgcggtataattttgcggtcgcggttttcggcgaggttttgtatatcgcgttaaaggcggttagcgacgcgggtaaggcgggcgcgtattcgttcgagttttattatcggttttcgggcggcggttacgagtttaagaaaggtaggcggttcgcggtcggcggcgttcgggaggggagggagagttagtttcggggaggcggagcgttcgggagattcgagggagggttcgg

SEQ ID NO: 11452 - DNA, 1059 bp, Artificial Sequence
  Description of Artificial Sequence: Synthetic polynucleotide
cggatcgtttttttttattttatttttcgggtttttattgtcgcggttttgttttattatttttagttgaggggtagttcggagttttatggttttttttttagagcggtcgttttttcgggtttttttagagttttcgaagagtcgcgtgaggaaacggggatttgttcggggtagtagatttttagcggtgaagacgtagagtatcgggttgacgttagaattgaagaaggttaaggtcgtagttttcgttcgcgtcgtttggtcggtttcgtttagtttcgttaaggtttttttcggtggagttagcgttgcgatcgtttgtagaaggttgattgcgtggtagggggtttagagtaagtcgaaggtaagtacgatggcgtttattagtcggtttattcgcgtttcgtgtcgttcggagttttagcgggcgtttcgtagtcgtgttagcgttacgttgtagtagtcgagtattagttcgaaaggaagtacgaaagcggttagagtttttaggtttaggtgggcggcggcgtggatcggcgacgggtggtatagttggtatacgcggtttttttataggtggcggtagacggcggtcgggacggcgagtaatagggcggttagttagatcgttagtagtaggcggcgggttagggtcgggttgcgtagtcgaggcgttaggaaggggcgggtgattgcgaggtagcgttgtaggttgagtaggtcggtgagtagtacgttggcgtatatgttgagcgcgtatacgtagtatatcgttttgtagttcgtttggtttagcggttaggtttgtcgggttaggaaggttataaagagcggcgtgagtagtagtatcgcgtcgtcggttagcgttaggtgtagtataagcgtggtcgttagcggtcgttttcgtgtaggtcgttagttcgttaagttttatattacgaagtcgttgttaggtagttttagtagcgtcgttagtagtaggaaggttgtgtttgtggttcgcgaagttttttagtttagtagtgtttcgttttttgggggacggtagtagatcga

SEQ ID NO: 11453 - DNA, 1663 bp, Artificial Sequence
  Description of Artificial Sequence: Synthetic polynucleotide
cgtaacggggcgggggtagacgtttttagttttagaatttcgtcgggtttatcgtttagtgtggacgatcggcgtttttacgagatttatcgagggtatatagtttttattttagttcgttttattcgatttagacgatcgttagcgcggttagcggttagcgtatagcgagttgtttgggtaattgtggtcggattttagggagtaagttggtttcgggttttatttagttttattcggtttttatcggtttttttatttaggagttggaggatggtttcggggcgttttagggggattgttggttttcggagtttttagttagacgcgttttgttgtgtgagtcgcgtgcgcgtttaatttggaggtagtcgttttcgtcgttgataggtgttgtttagagggcgtcgggtgcggtttttggcgtagttggacgcgtacgtttcggtgcgtgtagtttttcgagttcggttagagagaagagggagttagggcgcggtttgggggacgttagtggattggagtcgcggagtttcgagggaaaaattttgtaggcgtcgcggtcgggattcggttacggttttagtttattttagtaggtgcgggaggaagaggtagcgtcggagtttcgaggttagagagtttcggcggcggcggtcgtttttttttttcgagttggtttgaagtcgttgggtattttcggtttttgttgttgcgttcgtcgtcgtcgtcgtcgttatcgttagcgtcgtggggattcgggaggaggtgtagtcgaagagggaggagaagtaggaggaggaggaggaggaggaggggagaggaggagtagggggtggaggatggagtttcgggttgtcgcggcgggcgagttagagtcgtcggcggcgtttttttttttttaggttcggttttggaagaatttgtagttgggggtgggtaggagtaagggcggcgggggcgggcgcgttgggggtttagagcgtcgtattgcggatatttcgtcgtttttttcgttattttcggtgggtatagggaatgtatcggttagggggagtggtgtaggtagtaggtggagcggttttaagaagcggaagtaagtgttggatcgagttttttttttttcgtagtttaatttgtgttgttcgtcgtcggagtttttggagttcggcggcgtcggtagagtcgagtaggggtttacgttacgtcgtcggattcgcgagtatttgtttttcgtcgtaaaggggttcgcggcggtttcgggagtagcgggagggacgttttttggcggacgttttttcgatttagttttttttttttttttcgttttattttttttgttttttttgttttagtttttttcgaggggggatcgcgttcgagatgagggtgtacggcgttagggtttcggggcgtatttgtgttattagaagagtttttttttgtcgggtatcgtttgtttggagtagttgttggagtcgtcgttttttttcgtagagtcggcgcggagtttcgcggagtttcgggtttcggagacgggcgaggagtacggtagtagttaggtgagtgtcggtggcgcggtcggagataaggtgcgcgggattacgtttttttttttaggcgtttattattcggggagcggggggcgggggtcgggaggcgg

SEQ ID NO: 11454 - DNA, 2065 bp, Artificial Sequence
  Description of Artificial Sequence: Synthetic polynucleotide
cggagtaggtcgacgagagatttttgagaaggttggtagattatcgcggatttttgtttttttacgtggagttatgggcgaggcgtttaagaatttgttgaaggagttcgatttttttaagtttcgggttaggttttggagtatgaggtcgttagttaggacgtttagaaatgtattggtggtggaattgaggatggtggcggttatttgtacggggcgtttggtagtaagattgttatttttattatcggtcgtatttggtttcgtggtgtttcgtaggtttggatcgttaagaaggcggcgtagcgcgtacgaggagtcgggtcgtaggtattggtaggcgcgacgttcgttgtgattacgtacgtgtatttgggtatttagacgtattattagtagtacggtagcgttttcgtggtcgtgtagtgtagttaggtgtagcggcgtgtagtcgtcgtgggagcgtgcgtttacgtcgattggtgcgttattgcgtcgcgcgatttttattagttgtagcgttatttcgtcgtcgtcgtttttggcggtttaatgtagggtcgtgaagttagatatgaagtcgcgtttggtcgttaagtcgcggtcgcgtagtagtagttcgtgtagttggtgggtttagcggttttcggtagttcgtacgagttattcgtgttcggacggttttaggggtatcgcggacggcggcggcgcggcgggtaatttttcggcgttagggtttagtagacgcgggtcggcgcgcgataggcgttttaggtgcggggagcggttcgggtttaggtcgaggtttagatcggatttttttatcgagagtcgttttagtagtagaggggagtttcgcgggttcggttttttcgatagttgtcggcgtaggtcgggttttttcgttcggaggcggagcgtggcgggggtcgggacgtagcgtatcggtagtatatagggtttttgttgcggcggttttttcgttgtttcgggttcgggtttcgcgtttggcggattagagtagggcgatgtcgttttagaaggggttttaggcggtggggtcgcgtttgcggagggtttttcggtggtttgggttagtttaagggttggaagcggtgggtcggcggatcgtttttcgggcggttgagcgggttcggaggtcggttttttcggggtgttttgtggttttgttggtagatttaggttttttggcggttttattggtcgcggtattcggattaagggcggagttttcggggtagaggcgtttcgcggtaagatcgtcgaagtgggtttcgacggttgggtcgttgttttcggggggtcgaagggtgcgggttcgggtttcgggggtcggggttttttttttagtattacgaatttgacgtcgtcgagtttttttattatcgttacgttgttgacgaattgtttgaagcggtttttgcgggcggcgcggtttcgcgggtcgtcggtatcgagtagcggtttgaagcggtttagtagttcggagttgcgtattttttcgtcgtgtttttgtaggaagtttagtatcgtcgtttggtttatttcggtagtcgtagcggcggcggcggcggttagcgttatggtggggttttgggtttttggttttcggggcgggtgggcgtcgcgtcgtcgcgggacgcgcgggagcggggtttcgggaggcgcggtcgcgtttatttggtgtttttttcgcggttagtcgggcgtgttttcgaagttggatttcggtcgcgttagtgtcgttgggtcggggcgtttcggggcgaagggcgtcgggggtcgcggggagcgtttatttttagcgtttcgtcgggtttcggttttcggggtaggtttttgtttttgtattttgtttaatgggcgtttgtttttatttttcgcgtcgcgttcgttttataggtgatagttgttttcgcgatgtagagggaatcggagtagaaattttcgtcgtttttcgttcgttttagaattaaaggcgtagcgttttagttttggtttcggttgttaggtgggtgtgttttttagggacgtcgcggttcgt

SEQ ID NO: 11455 - DNA, 3487 bp, Artificial Sequence
  Description of Artificial Sequence: Synthetic polynucleotide
cgcgcgtttttagttcgtttttggaggtagttcgcgggatcgtaggttggaggcgcgtcggcgtgatttcgatcgtcggagtcgggaggaggagtcggaggaggttgcggggggtttcggtttaggcgaaggaagggtaagaggttgttcgatcgggggcggcgtcgggaggtgggtgggtttaatatttaggtcgggggaggggtttaagagatatcgggaagggtagtcgagttttaggggcgggtggggtggtagttgtgtgtagtaggggatagggttgggtttttggaagttagagtgaagtttttttggttgtttcgtaggtaattttattttttggtagaatagttgcgaatcgttaagttgatttttttcgttttttggtcgagaggagaggatgttttaggatttagggatgggcgggaagaaattatggggagttataagtttgtatttaggcggggaggaggcgggcgggcgtcgtttcgtaggcgtaggcgagtgggtgggaagaagggagggagagggaggaaggaggtgaggtcgggaagatgttattgtcgggggcggggcggggtcggggattcggtaaagggattgtagtagcgttaggtgggggcgggggttgtaatgttatttatttgagagttaggtgtgtgcgttttaaacggggttcgttataagtcggtatttttttggtattatttatggtgtagggttttaggtagagggttggggattgcggattcgtttttgaagcgggacgcgaatcggtagagttgggagaaggtaaataagggttacgttttttgtcgtcgtttcgcgggcgcgtattcgtcgtttcggtcgtcgtcggtatatttttatttttttagcgtttttttttagttggattatcgcgcggtttcggaggtggaggttgttttcgattttagtttttatttttggcgtcgaggtttcgtattttttatatttatttggaaagggtgtttttcgtttttttaaaaaaattgtttaatttgtgtagagtttttaattttaggagtcgagtatgttgttttcgcgtgtagcgttcgcgtgtatcgggtcgggagagggggcgatagggcggaggcggtggttttcggaaggtgtttgggatcggatcggttgtacgtgagtttagcgcgaggttatgtgtatcggtttagttcggttcggcgttcggacgtgttgcgtattaataaaatgaaattcggggagataggagggtagatagttttaggttttcggagttttcgttcgggtcgttcgatttttttatcgtatttatttttcgtcgtagtttttacgttcggtcggagttcgcggggaagttgtagttttggcgcgttttcgttcgttcgcgttttttcgtcggttcgggggcgttttgtcgtagttattaataaagaaggtcgttaagtttatttttttaaaagttgttgttgtatgcgttttttttagttttttcgtattgtattttttaaaatacgattgattaatatgcgtaattttttttttttgtgttgtgtatttttttttttttcgcgttggttttttagaataggtagttagtaggagagagagggagcgagcgagtaagagagagcgagggagcgaagagcgttggtagatttgttgtaaaaacgttaaataacgtcgtggagatgcgtagggtttattcgtcgggggttggattttattttgtttcgcggtgtttttttgacgggcgttgttttcggttacgcgtcgttgtagggatcggcgcgggaaggatgttttcgaagtcgggagtttttggggtcggcgcgggagggcggggggcgcgtatttattcggggtcgcggcgagggaggcggtcgggttcgcggcgttttaggttttacgtttttcgtcggggacggtcggttcgtaggatttaagtcggtgtcgttaggagtgggcgtaaagtaattttatggacgttatttattttttttaaaaaatagtttttaattgcgatggtcgcggtcggtattatttattaattttttgtgtatgtttttgtttttttttaaattaagatttttttgtgatttttttagaaaaaaaaaatgtgttggggtgggggtggggtgggggcgggtaggaggagcgagggagggggagtagttattttttttttatttattcggattttcgttttcgatattttcgtcgtcgtttttttaatttttcgtttagttgtttggtttcggcggggagtttaggtagcgttgcgggtttcgtgggggaagggtgttttttttcgtagttttattattacgtttgttggtattttgggttcggattttttatggattttggggcgtttttagttcgttttgtttttagggtcgggttcgagcggcggttgcgttcgtgtaagttttattaggtttgtttatattttatatatttatatatatatttcgtttttttatttttttatttatattttttgtttatatttcgttttttacgcgttttagattcgggcggcgtttttcgtaattttaaaaaaaaaaaaaagcgagtttatatttaaaaaaattttttggcgttatattaatgacgtatttaaaatttgttatttttttttgcgttaaaaagacgtttttttgtaaataatagtttggaggcgatattcgcggagggaacgaggtttgtattgagtatttcgtttttcggggttttagcgttggaagattttcgttttaggttttgtttttgaatcgttggttttaaaatgcgaatcgaataaattgcgtggcgttttgtagtattagaagtgagtagaaagtgttggtaggaggggagtggaggggcgaacgcgagttttggggagggggcgcggttttttttttcgtatttattttaaatggaaaattaatatttcgggcgggggaatttgaaattgtaggcgattttaagaaaagaggggcggttcgtagagagggtttttattgggttcgtcgtttttttttttttttcgggtgttttttggcgtttagcgttgtttcgtattttcggggggtggagaaggtagtgatgagcgggtgggtgggtggttgtatattttggttttagtaggattttgtttcggggcgatttttttttttttgttttttttttttattatttcgaaaggttaaaaatcgaggggtaatttttaaaggttggtatatggcgaggaagcggggcgtttttttttttatttttcgttttttcgttttttttttttcggttttatttttcgatttgattttgtggtgtataaatagtacgttcggattttcgtagtttttggaagaagagtttgcgttcgttaggcgggcgggttgtcgggttgttagtcggcggtggcggggttttgggtttgttttcggagtcgcgggttatatttatttaattcgttgcgttcgtcgagtttattttttttcga

SEQ ID NO: 11456 - DNA, 847 bp, Artificial Sequence
  Description of Artificial Sequence: Synthetic polynucleotide
cggtcgttttagtaaagtttttaatttagtcgatatgacgcgcggcgtagttaatgggaggcggagttggcgttttttggtcgggggggggtcggaggggtgggtttcgcgttttcggtgtttgtcgtgtttattgaatggagagagcgagcgtcggttagtttattcggtcgtttcgtgttttagtcgtagtcgtcgcgttttttagtttagttttaagtcggattttttcgggcgttacgttttattgcgttcgttttaggtttttaattcggttcgcgggttagcggggttagggggcgtttcgtatttgggtatttttagcgatgcgtagcggggtagcgtcggtttcgtcgatggagttgttgttgttgtcgtcgtcgtcgttcggagcgtttcgtttcgttcgcgtttcgtgcgtttgagtatcgagttcgtttttttttcgcgttaatttcgtcgttcgttttttaggtcgttcgcgtttttcgcgcgttttttcgggttttacgcgttttgtttcgtagaggtagttttttttaggagcggggttttgtatattatggttttcgggtgggtaggggtcggcgtcgtcgtgcgcgttcgtttggcgttggttttggcgttggcgagcgttttgagtgggtttttagtcgtcgtttgttttattaagtgtatttgtttcgttgttagcgtggattgttacgggttgggttttcgcgcggtttttcggggtatttttcgtaacgttgagcgtttgtgagtatttttgttttattttacgcgggttatttatttgggttttatcgagggggttttaggcgttagattcgtttttttttttcgg

SEQ ID NO: 11457 - DNA, 909 bp, Artificial Sequence
  Description of Artificial Sequence: Synthetic polynucleotide
cgggacgggggcgagattttgggtttttaggggtattgaggggtcgtttatgtcgggggatatggttatttgggggcggttttcgttaatcgcggagtggggaaaaggggggagggatggaggacgaacgttcggcggtgtttaaaggtacgacgcggagtaggaattatagttttggtttttagaaagcgcgcgcggttcggggtagaatttgtcgaagttttagttcggggcgtaagggatgtgggggttattggaagacggggcgcgggtcgttcgtggggaggagattggattcgaattcggtttattttattcgagcggcgacgttagcgttgattttaggcgtgtttcggttttcggcgcggtttcggtttaatcgtgtacgttcgcggaaggtttcgtattcgcgttagaagtggtttgttcggggttatcggttcgtaagttttcggtgttttcgaggtttttgtttcgtttcgcgcggttgtagtcggcgggaggggttgagaggcgggtcgcgttgggatttaaggcgtcgttttttcgttagttttttttttttttcgttatcgggtggtcggagattcgggggtattgttggggtattttaaagtatagggttagtttgagtgcgtaaggttttgaaaagacgggggggcggcgataaggagtagggaggggggttggaggaagacggtaaagtgatttcggaagggtttaggcgttttaagtttatcgaagacgggaggtttttagtggcgtttggggggattgtgggaaaagtagtttaagaaggggaatttggagcgaggtgggggagaggtcggtatggttttttttaggagcgttagcgttagatagagcggtgataggtcgtatcgggagtatttcgtttatattgaacgg

SEQ ID NO: 11458 - DNA, 2150 bp, Artificial Sequence
  Description of Artificial Sequence: Synthetic polynucleotide
cgtttttcgtggtcgggaaggttaggtcgagcggggcggttagtcgggtcgggaggagggggtttttcgggtcgcgcggtcgtataaagcggggagatttgttgttgcggcggtatgaggcgcgttttttttcgcgagttagcggagcgcgcgcgttcgttttcgtttttcgtttttcgttttagttttcggagcgttattcgcggagcggtttacgttagtcgtcgggcgtatcgcgttttagcggtcggggaggtgcgttgttcggttttcgtaaagttattgtgaatggggagcgggtgacgttagcgtcgaatgttaataatgtagcgattgagagtgtgggcgtttcggggagagcgtaagtcgcgcggcgcggagtaaatagcgtcgagtcgtcgtcgttttagtagtagtagtagtagtagtagcggtagtagcggtcgtgtacgttcgggttgcggtcgtatagcgttaacgtgagcggtcgtcgttttcgttatttcgtttgtttattttcgtcgtcgtttcgttttcgtttttttttcggttttttttcgtttttttttttttttttttttggcgtattcggggggttgggaacgagttgttatgtgatgcgcgtttttttcgcgagttttcggtgatttacgaattgtttatttcgtcggttgtcgggagggggttgcgagtcgggaagacgcggggaagaggaggcggaaaaggacgtaaagtttttcggcgaggtgagtttcgggtttcgggtttcgggtttcgtcgttgggcggggtggcggggtaagtttgcggggggagcgggcgcgcggggcgggcggggaggcgtggggaaacggcgcgggaagggagtttcggtcgtcgggcgcgtagtcgtttttttcgcgttttgttcgtttttatggtattttttaggaacgggaagggggtgggagtcgagtcggcggtcgcgtcgcgtcgaatgtgtgttttttttttcggttgtttacggcggtcgaggcgtattgtattttgttggcgtcgaagggtgttttggaatagtagagggaggaggagtagagagtaataagttaggtatggggagggcgggttgtaggaggcgcgcgttcgcgcgagtcgtagtagttgttagattcgcggttttgttttcggttcggcgaggttcgggtgtttcggtttttagtttgcgattttagttttaggtcgggcggttttttttttaattttcggcgtgcgtatttcgggttgtttcgcgaggattttggtcgcggcgtttttgcgtttagttgttagtcgtcgtcgggtggttcggattatcgcgatcggcggggaattaaagtttaagtttagggtcgtaggaagaggcgagttgggggtttcgcggcgtagatttggatcgaattttttttagcgaaagatcgggttgtcggaaagcgtttcgcgtagttaagatttaagggcgttaggtttttgagagggaaattttgtatttttttttttatagattttttatgaagttaaggtgtaatatatatatatatatatatatatatatattttatattttagtttttaagttttagaagttttatttaggagattggtttatgaaggggatattgtttttttcgttttcgcgtcgaggcgtttcgtggtttcgttgtgtttcgtttattcggcgggtgttcgggagttcggcgtcgttggagacggcggcgggcggcgtttacgggttattttaggtgtttacgaggggagagattggagcgagtatttcggcgatttcggtttggttaagtatttgtaggaattcggatcgtgaggggaagcgtgtagggtcgggagtgagtgtgtgaaggggtggtatatttttggtttttggggtcgcgggcgtatggggtatttttagtattttttcgcgcgtaggcgagtttggtaatttgagggaagtttcggcgcggtcgttgtcggggtggtttgtttgtggttcgatgaggcgcgtttcgtagtttgttttttcggttatcgtcgtcgtcgtgatttgtggtttttaggaaacgagagggatcggggcgttttattcgcgagacggattcgtagtttttcggcgggttcgcgggcggcgagacgcggcgt

SEQ ID NO: 11459 - DNA, 506 bp, Artificial Sequence
  Description of Artificial Sequence: Synthetic polynucleotide
cgttttacgacgtttatgttagggttttttagattagcggagaaattagtagttttggatcgtaagcggcggggttagggaggcgataacgggaagtttttgtcggattttggatatttaggatttagtgttgttcgggcgttttttcgtagtagttttagggcgaggaggatggggggggttttcgtaggggttatattgtcggagttttacggattcgggcgggacggtgaggtttttatattgagtcggtggtaaagttttcgcgaggatgaaggaggaatttcgtgttttttattttattaggtttcgtattttttggttttttttgttttaggaatcgtttgttttttgtcgcgatcggcgagttttttcgggtttttttgaaatagtttcgtttcgaggttttggatttggaagtttaggggtatcgttcgggagcggggtatttattgtgggttttcgttagttagtatttaggttcggagttcggggatagcgggcgt

SEQ ID NO: 11460 - DNA, 1503 bp, Artificial Sequence
  Description of Artificial Sequence: Synthetic polynucleotide
cgcgtttttgggtatttagaaataggtttttttcgggaattcgttttcgatcgggcgtttttataatatttgaagttttttaggacgttttttgagttgggtaaggcgagaggatttttttttagagtttagtttcgagtaatgttcgagttcgcgaggtggggttgggggcgataaggaggcggagcggggatttagttatcggggatttttttttaagttagtttttaaattattcggcgttatgtatttatagttcgcgcgtagttcgtgcgttttggattttatttaagtattaggttcgattagggtcggttcgaaggttatcgtttacggttagggtagaggggcggcgggaaaagggtttagtggattttcggtttaggagggtcggttagttgttgggtcgcgggtatttaaagttgcgggggttcgggttttcgattttacgtttagcggggttttagtattcgagggcgcgcgttgcgattcgtagagtagcgggtgtagtaggttggcggggttgggatcgcgagttttgtttgtaaagtttaggcggggtagacgttagggagggggtcgcgtttacgcgggtagtttcggcgttgataggtagcgacgtattttttcgtaattcgtttattagtagtttaaagtgtgtattgggtttttagtgaaatgtttggttttgaaagtttagttaatatcgggtttagcggagttattagggtcgttttttgtttcgtagaattaggttttggtttcggttacggtgggggtttcgtattagttcgataatttcgaggttacgcgttcgaaggattttttgggataagaagtggagtggggcggttaggacgcgggtcgtggggatcgcgagggaggagggggcggtcgttcggatttatttcgtggggttttcgcgcgcgggcgtttcggcgtgtcggattatgtcgtcggtagtttcgggacggggaacggaggcgtttaggcgtcgggtcgcgcggaacgcggagtttcgggcgttcgtatgtttttggttttggttttttggaagggttaggtcgtcgttgtcgtcgcgttttggggttttcgtttttttttattttttgtatcggagcgagcggggtttttaggaagaggttggttttggtggttaagggtttttttgttaaaagttattcggtagcggttcgcggttcggagttttttggggtatacggaggttcgggcggtcgcgttttcggggtcgggtttcggggcggggggtgttggggttaaggcgtcgtacgggcgtttaatttcggggtgtcgtttttataggttgtggttggggttggggcgcgggaggttcgcggggtttcggagagggaaatttagagaaaagttttttatttggtttggggtcgtaggggaaggaagacgtttttcgtttgtgtcggcgtcgatcgcgggtcggtaggtggggaggtttagagttggcggggagttcgttttattcgg

SEQ ID NO: 11461 - DNA, 907 bp, Artificial Sequence
  Description of Artificial Sequence: Synthetic polynucleotide
cggtttacgtgttttttattttggttcgtagaggtttgagtgttgtttcgggtagtttcgggtagggttgggtagggtttagcggattttacgggtcgttttttttcgtttttttttagttatttgtttgtcgttttttttcgtttttttttttttgaggtgttgtttcggttttcggggcgggggtagtcgcgggtagtttagttcgtagcgtttttagaggtgttcgagttttttgaacgtttcgtaggaaagtagttgtgttgcgtggagtttttttttcgtttcggttttttcgttcgtgtttttgtttttttcgttttgcggcgggaggtggcggtgtgggttttcggggaggcgcggcgggttggggaggtggggaagggtgtgcgcgtgttgggggtgggggggaaagatttgtcgtttttttttttcgtttttttagtttttggttgttatgtagtttttatggtagcggtatttttagatttaatttttattttcgtttagagttaattaaggtaaaatagtgaggggaggagggaagagcgtggttagggaagggaggggggagaggtaggaaatttaattcgaagttgtaagtgtagcgtttattttgttaaagtcgtagtatagatttcgaagtcgtagcgtcgttttttttttttttcgttttagttcgagcgggaagcggtagtagttttttagagttttggtttggtagggaggggacggcgttcgagtagttatattgtagtttttcgggtttttttttcggtcggcgtaggtttcgcgtttacgattttttttgggagtcggatttgttttttttatcgtcgttattcgtcggtttttgcgttttttggttttcgatatttcgtttggtcgtttttttgtgtcggttcga

SEQ ID NO: 11462 - DNA, 1925 bp, Artificial Sequence
  Description of Artificial Sequence: Synthetic polynucleotide
cgggtttttcgtcgttttggggttgagtttggtgtcgttgtttatattgaataggacgttttttttcgtgagcggcggaatcgttattcggtaaagcgggtgttcgaatagtttggttaggagggaggcgttttcgtcggggtcggggggcgattcggatcgacgcgggtcggggtttcgtagtagcggtcggtgcgcggggtcgtggggttttagggcgtcgggatttcgttttcgtaaggcgcgttcggtcggttcggtcgcgggcggtagtttttttagcgagtgggacgagaggttggaggaggggtcggagttgaagttttgtaggatgcggagcgtgtgtttgttgggttagttcgcgtcgtcggcggcggaggaggcggtcgggggtttttcggggcggtttcgaatttgggtttagtcgggcgcggttatttcggcggcgggttgcgcgtacgaatagtcgggttttttcgagggtcgcgcgtcgcgtcgttttagtttgggtagtaggtttagggcgatgtgtagcgcgtaggttattaggaatattattaggatgagtacgcggaatcggcgtattagtattatttttatggtcgcgcgggtcggttcgggtttggagcgcgttttgttcgcgcgtttttttagttgtagttgggtacgagcgcggcgtcgtttcgcgggttaaggtttatcggtgtcgggcggttattagtttcggggttgttttcgggttcgggtcgcgtgtagggcgttcgtcgtcggagcgttgggttttcgcgttatttcgggttcgttttcgttcggttttttcggagcggtcgcgtttttagtcggggagtttaggggttttggttcgcggagtcgggcgcgcggggggcggttggggtcgtagtagggggaggttcggcgttcgtagtcgtcggcgcggggtttatcgggcgtgtgggtttatttcggtcggggcgcgacgggtttgggcggtggcggcggtcgtaggcgtttcgatttttagcgcgtttttttttaggcgtcgggcgggcgggcggggaaggggcggttttttcgggtcgggttttgtttttacgtcgcgttcgggagatcggggttggggggaaggggggggcgaagggcggaaggggtgggcgcggggagcggtcggcggggtttcgggtaggtgtagcggtcgtttcgagcgtagttttcgtttggtcgagtttttcggcgtttcgcgtttcgggcgggtagatatcgagcgtcgcggagtcgtttttcgcgttagcgtttatagattggcggagtcgtcgttttacgagttacggttgggttcgggtcggttgcgttttcgtttttttttttttttttttcggtcgcgtttcgcgacgtttttgagtttcgggttcgttaaggagagggttttttttgttcgcggtttgtagagggaagcggcggagatcgggagggcgcgttcggttttggttaggttagtagttgcggtcgagtggggggtttcggtttggtcgttttttgggattttttttcgttcggggtcgtcgtcgttagttgtagtttttcggtttttttttagaggagcgcggggtcggggtttaggttaagttttttttcggagtcgcggggcgtttgcgtcgtcggatgagtttttcgtcgggcggcgatttcgtgttttacgttcgtttcggtaaggaggaggcggaggcggtttcgcgagagaggtttaaggagcgattgggtttggatttaggggacgttagggtagcggagttttcggtatcggtttcgttttttttttttcgtttattcgcgggacgcgttcgttttaattttttaggcgtcgggttcgttgggggcgttgagaggggttggtgtgtcgggggcgtttttttgtttggggtcgacgg

SEQ ID NO: 11463 - DNA, 1287 bp, Artificial Sequence
  Description of Artificial Sequence: Synthetic polynucleotide
cgcgtggttcgggaggttttcggaggagggaagggtttattttagcgaggggtataggcggagaaggtgcggggcgaggcggtcgcgggtttttggtatttttttttttacgtttaggttaagttggcggtgttgttggtgacgttggtggtggtcgcggttttttatttgcggatggagtagaagttgcggcggggcgtggtttcgcgttagtttcgtatttcgcggttttagtataaggtgcgcggtgacggttatttggaggaggataattcggacgagagcgacgcggagggcgagtatggggacggcgcggaggaggaggcgtcgttttcggggtttaggtttggtttcgagttcgttggattcggtcgtcggttttgttcgtacgaataggcgtaggggggcgacgggtcggaggagtagtgaggggtcgtttggttttcggatttagtttcgtttttcgtcggttttagtttattacgttttaggtcggggggatttttttcgagtttcgcgttgttttcgaaggtttttgtttttttttttttacgttggggacgttttttttagagttcgggttattttcgggttttcgtagttttttttaaggcggagtggagttttgggaatttttcggttaagtataggggttcgaaaatatagttgatatttcgcgggtttttagtacgcgttttagcgtcggagtagggttagggtttttttgcgattcggtttcgttttagatttttttagttttcggtcgcggattcgggtcgcgtgtgagcgttttttgtattttttatttttagggttcgtcgagagttacgattttttatagaaaatgagcgataaagagattttgtattgttttgattggagagttttaggtcgcgggggacggagcgtttttgggatgtacgttcggttggttcggtttttgggcgcggtggtgagaggttttgatttagggggatcgcggggtgtggggagtgcggagttttattgggggcggggcgaggtgttcgtaggtttcgtttattagtttttttttttttttgaggtttcgtttttttatgtttgtttgtttttgttagttttagttaggagaagggagcgggggagcggttggtagagatagaggagggtgtgacggcgttgttggttttttatgggtttagagggcgagatagatttcgaaggtatattttttaggggtttgtgtaggtattttcggttttttagcgattattttcgcgtcggatagggtttattttcgagttacgg

SEQ ID NO: 11464 - DNA, 2906 bp, Artificial Sequence; identical to SEQ ID NO: 7254
  Description of Artificial Sequence: Synthetic polynucleotide

SEQ ID NO: 11465 - DNA, 2146 bp, Artificial Sequence
  Description of Artificial Sequence: Synthetic polynucleotide
cgaaagcggttttgagagcgttttcggggttttttcgaagtgtttaaattattagcgtggttagcggtttcgattttttattacgttttttttcgcgggtttaaagggatttgggtttcgtaaatttttgtcgagggagacgttcgtcgatttcgtcggtttacggggcgttttgtttttttcggggcggttttttaggtaggttgagagcgaacgggatgagtatatttcggacgtttaagggggcgtttagcgtttcgaagtcgtcgttttggtttgcgtcgtcgtcggtttcgttttttcgggtaggttggaagcgttaggtgttcgcgcggtttacgtagtagatggcgtcgtttagggcggcgtagcggaagggttgtaggttcgtggggtcgtcggggaggcgtaggggcgcgacgtacgggttttattgtttggttaggtagtggtatcgggatacgttgatttcgttcggtttcgtcgtttgcgtttcgtcgcggttgtcgtttagatcgaagcggtagatgaagtcgtcgagagttattatgtcggtcgagcgttcgcggttgttgttgtacgggtatttttgttattcgtcgcgtcgcgggttatatttgagtaggcgatagaagagggagttttcggatacgtagatttcgtcgtggtaggtggtggttttatgcgttacggcgaaggcgtttcggggtagcggcgttacgggggtttagcggtcggcgcgcgggtcgtagcgttttacgttgagtaggtattcgtcgtttacggcgtagaggtgatcgtttagggttagtagtcgtagttgcgagcgcgtttggcgtaggggttttacggcgttttagttgttcgtggtcgggttgtagtagaagatttggtcggacgggcgcgcgcggtcgtcggggttcgcgggcgttacgtcgttcgttacgaagaggtagttgtagaggacgtataggtcgtagtttcgcgtcggcgcgttttcgggtagtcgcgttagttcgcgttatttttcggtcgtcgcgtggaagtagtagacggtcgcgttttcgcgcgcgttcgcgtttttcgaggggttttgaggtcggttgttcgcgcgttttttcgtcggttcgagcgtcgcggttaagaggtgggcgcggtcggcgcgtaggcggcggcgtagtagtaggtttcgttttgcgttcgataggcggtcgaatacggcgggttcgcgtagtatttttagatagtggtcgtttatgaagtagtaggcggcgtcgcgtagttcgtttagtcgttgtcgtttggtcgcgtttaggatttcgtagtagttggttaggtttagttgcggttttacggcgtcggtggcgcgttgcgcggcgtcgggtagttgtaggcggcgcgcgtcggttattatttcggttacgttgtcgggtcgtacgttcgttatgcgttcgttgtaggcgtcggcgaggagtagtcgtagcgtcgttaggtttattttttgtattcgtagtacgtttcgcgacgcgcgcgcgcggaagtagtcgttgcgcgtcgttagtatcgttttgtgcgcgcgtagtcggcgtttcgatatttttagtattaggttcggtttttcgtatatcgtttcgaatttcgggggtacgggcgcgggtttttcgggtttttcgggggacgcggggtttttaagttaaacgcgcggttcgggggacggcgtcgcgggttttttcgggtacgcgcgttttttaggggacgcgagttttttcggggacgcggcgttcgcgttgtcggttttttattgtcgttttattattcgcgggttatcgttggagggcggggaggtggtcgcgtttttcgtcgttgaggcgagggattgcggcggggattttttttcggagttgaagtatagggacgcgtcgagattgtagggtgtttgcgtcggggacgcggcgttttcgttttcgtttttttcggtagtttcgggtttagtttttgggtagaggacgtagggggttatcgcgtgttttatggtcgggttgtgttgcgttgcgttcgcgcgttttcggtttcgtagtttgtaggtttggttaaggtcgagttttatttcggggtttttagttttatagttttttttggtacgcga

SEQ ID NO: 11466 - DNA, 865 bp, Artificial Sequence
  Description of Artificial Sequence: Synthetic polynucleotide
cgggagtttttttttttcgtgcgtcgttgttcgggacgagaaattcgtggggtatttaggattaggatacgaggttttagtttgggtaggtggataagttgtggggttttatttttcgtaggcgatggttttttaaagtttgtataaatcggtttcgtcgggtcggttatgttcgttttttttttcggcgtgggaagtttttttaaaagtggaggggagcgagtgtcgcgttttgttaatttcgattgcgtttgggtttttttcgcgtcgggtttcggagtcgttttttttgattttgcgattacggtcggggattttgcgcgcgttcgggaatgtagagtttttagcgtcgcgtagggttcgtttcgatttcggtcggttttgggtaattcgtttcgcggttagtttttattttaagatgtggttcggtttttattttcgcgggggggaaatgtcgggcgatttttatattgatttttttgcgtatttagcgtaaattacgaatttagagttggagttgttcgtagatttcgcgtagttagatttcgcgtttttatttcgtttcgtttcgtttcgtttggcgtattaattttcggtcgaggaggggtcgcgtggcgtcgcggggggcgggtcgcgtacgtttttcgtagggaggatttagggatagttagggtttcgggagagttcgcgcgtatcgttcggtttcgcggcgttagttatggcgttcgtgcgtggtttcgttagggatggggcgacgcggttagagtcgtacgcgatcgaaattcgtattttggagtcgtagagcgcgcggttttgttgtttagcggttttttggtaagtgacgtggggaagaaacgtagggcgt

SEQ ID NO: 11467 - DNA, 865 bp, Artificial Sequence; identical to SEQ ID NO: 11466
  Description of Artificial Sequence: Synthetic polynucleotide

SEQ ID NO: 11468 - DNA, 1463 bp, Artificial Sequence
  Description of Artificial Sequence: Synthetic polynucleotide
cgtaatttggggttcgtagacgcgcgtggatataaaaatatacgttttcgagatttatttttttcgggttatattgtggggttgcgttcggggtacgggttatgtttgaatttttttttatcgtcgcgtttcgggttcgcgtttcgtcggtcgttcgtattgggtttcgcgtcgttttcgttattatatcgagtcgtttagtattttttttttttgaaggttggtttcgttcggggtgttttttttttcggttttgtcgtcgttgtttattttttcggttttttttcgtcgggtcgggtagggttggggcgcggggttgggcgagggcgcgttagtttattggagtttttttcgggcgtcggggttttttcgggcgggcgtcgcgggttgtggggttggagttggagtcggggtagtggttgtcgggttcgggttgggttggggttttcgcggcgagtttgcgacggcggcggcgggcgatttaggaagtgtaagggagagacggggtagggcgcgggtcgggagcggggtatcgagataatcgggtttcgggagggcgatttggagagggagggcgggagttaggggaggaaggaagaaggaaggaaggaaggaagtaaaggatggggcgaggacgcgcgttttaggagtaagcgcggagagttggggttgggggttgtagtcgttggaaggaggggacgggggtgtttagagaggaggaggaggaggaagaggaggaggaggagcggggcggaggagcgcgggtcgcggttgggacgttgggattcgagagtcgttgagtacgcgttttaggtaggttttgggaagttcgggatggaagtagttttttttttttcgtttttttttttttttttttttttttttttttttcgcgtttttttttttttttttgttttttttggacgtgggttgtcggttgtagttcggagggacggggcgcgggacggagtttttcgcgggaggaggggtcggcggtcggatggcgcgcgtcggggaggggtagcgggtcgcgggcggaagcggcgattttagttttcgatttagcggttggtcggagggcgagggttcgggaggtcgagggtagggaggtcgggtttcgtcgtttttttggttttcgggggtttcggcgtttgcgcgtttcgggatttcggggattttgtttcgtcggggtttggatcgggatttgggatgtgtgcgatttttagtttgtcggtttttatcgagggatttgtatttttggttttaagtttatttttttcgagttagattcggttttttttttgttgtttgaatgatagtatgagaattcgagggatatcggggatagtttatttcgggtcggtttttttaggatagggttttaaatttatttttagcgcgggttttgcgacgcgttcggagtttttttcgtttcgttttttgagcgtttcgcggtttttcga

SEQ ID NO: 11469 - DNA, 1437 bp, Artificial Sequence
  Description of Artificial Sequence: Synthetic polynucleotide
cggtttttcggagttgaggtttgcgcgattggatttaggggtagaatgagtgcgtcgggaattttaaaattttagattaagatataaggggagtcgacggttcggaaatttcgttgcgggtgttttaagcgcgaggtcgttcgggtagggtcgtttagggatcggggcgttgggtgcggggtacggggttttatttttcgcgggttggggcgcgtagcgcgcggtttttttaagaaagttcgtcgggcgagtttattaaagtttaaaaattcgtcgtggagaagggcgcgggggaagaggagagagggagagcgttgatttaggcgagagagaggggaaaggttcggtcggaggtcggcgtttcgcggtcggggtcggggcgagtttacggtgggcggtggggattggttgcgcgttttttcggagatcgcgcggcgggcgggggagggggttggtcgggttttagttgaggtcggtttcggtttcgtttttcgtcgtcggcgttcgttttttttttcggcgttcgtttttcgtcgtcgttgtcgtcgtcgtcgtcgtcgtggcgtattcgtcggtcgtagtgaaaaggcggaggcggcggttttttcggtttttattgtttttttcgtcgtattttttttttatttttcgtattcgttaaatttgatgtgattttggttcgacgcggaggttgttttttttattgtttcgtgggtttttcgttattcgtttcgtattcgcgagcgtatcgtttttcgcgtttttttttatttttcgcggggtcggcgtcgcgttcgttttcgcgttttttttcgtcgttttttttttcgtattatgagtaatttgaagtcggacggcgagtacggcggtagtatcggtatcggtttcggcgcgggtttcggcggcgttttggaggaggaggtgggtttgtggtttcgggatttgtcgggtgaagcgtacgttaggcgggcgcgggagagggcgagcggggtttgtcgcgtttcgcggggtcggggtggttatcgttttcggcgttttttcgtcgttgttttttcgttcgggtaggagcggttcgtgttcgcgggcgggagcgtgcggtttggattgtttcgtcggataggtattgttttttcgttttttcgggttcgaggcgggtcgcgcgcgtcggtcgtcgttcgggcgtttcgcggtgggcgagatgcgtcgcgttcgttttatgtttgtcgttcgcgcgttttttgttttttatttcgtagtcgttcgtcgttttttttcgaggcgtattttttgcgtggttaggatttcgtttcggcggtacggagcggagcgggattagtacggttcgagggcggtatttttattttattgtttttttcgttttgatttttttttcgtgattttggaggtttgggtcggtcggtttttcggtttttgcga

SEQ ID NO: 11470 - DNA, 717 bp, Artificial Sequence
  Description of Artificial Sequence: Synthetic polynucleotide
cgaggagaaaggtcgttaaacggagcgagagtttttatttttatttattttagtgttatggtggtatatgtcgattattatttgcgaggttttttcgtagatttgttttttcggtttcgtagcgcggacgattcgtagcgttttacggttatggttttttttataggggtgagtttgtttttcggatgggtggtgaagggtgattttggatttgatttttgaatcgtagcggtttgtacggggatcgcgggcgtgttgattttatgtgtttcgtttagttgttgtagagtcggtttatcgtacggtttttgcgggaggaggttattttggagcgattttttatttggtagggagatttcgaatttattgtgcgttggttgggtttgttgggtttgggttatttcgcgttgaatcgtaggaaggtgtgagagaaggggaggggtggagaggggtttggttcggtcgcggcgaggtttgtaagaggttgatttcgagttttagtaggtgcggtacgtgagtacgttgttgtcggcgtttttgggcgtattgggcgaaggcgacgcgcggttcgtgggtgtagcgttgggcgttttgaggaggtttttgttgcggtttcgggcgtttgtgcggtttttgagcgcggagttgggatcgcgttttttttcgttattggacgacgtgagtaaacgtttcgttttcgggtttcgtttttgtcgt

SEQ ID NO: 11471 - DNA, 1713 bp, Artificial Sequence
  Description of Artificial Sequence: Synthetic polynucleotide
cggtagcgaattaagttgcgtaggcgttttgtttttttttttattaatatgttcgattggtttacgattgattatattattggttcgcgtaattttagtaggtttttgggtttgtagttgagtcgaagtttttttttttgcgtagcggggcggggtacgatggtggcggggggggaggggggaattgttttattacgtatgcgtatcggggatggcgatagggtttttttttttgtttttttttatagttttttttagtcggggggttgagtgtttttttttttttttttttgttttttttttttttttttttttatcgtttagcggggtttttaattgatagttgtcgtcgggtttcgttcgtgtatcgtttttttttgttcgtgtttttcgtaggtagaggggggcgggagggggtgtgagggagaggaggagtcggagtcgtcgttgcggtttttttcggggaggggagaggagaatttttttttttttcgtttttttttagtttttcgttggttcgggagggggtggggcgtcgaggtcgcggcgattcggtagggtttggtcggtgaagagtaggcgggcggggtgcggaggggtgaggtcggcgagggtcgtgcgcgcgtcgtcgtcgggggggaggggagaggagggtatttaggttttttttttttttttttttttttcgcgcgttatgtaatttcgtttcgtcggcggtgagtttaagattttcgcgcgtatcgagtcgagtcggcggttgaggagagttaggttcgatgtggcgggggttacgcgtcgcggtcgagtcgtgaggaagcggttcgcgtttacgcgttttttagtatttcgagcggttgttttatatcgtttagtttaggtttgtcggggtatgagtgtgttcgggacgtcgggagcgatggagtcggttggggaggaagagcggtcgttatcggcggtcgaaggagaggacgacgaggaggaggtggtagcggcggtttagattttagggtcggtttacggaaggagtgttttttcgttggaggacgcggacgattaggaggaagagatggaggcgatggtgatcggaggcggttgttgtaaggagtaggagttgatttacgagttatagtagggttatcgtattttgggcgagtttttgtaggagaagtatcggggttttatcgttttttttttgtagtttttggggggcgttgttatcgcggaggaggaggtggcggaagggtcgcgtagcgggggtcggggcggtcgcgttttttcgtagtagttcggatagggtatgtgtttgttgtagatggaagagaagttcgttagcggttagtacgggggtattatcgagttcgtggcggattttaggttgatgttggagacgtgttatcgtttgtacggagtggattattggatttttaaatagggttagaagttggagatgatgttggagtagaagttagcgtttttttttcggtaagcgagttcggttttcggtgggattgatagattgatataaatatatatttatacgtgttcgaggatgggttgggttaggggtttgggggcggcgttgataggtgttgagtcggtgttggagaagttcgggaggaggagcggcgttgggcggggatcggaggggtgtggtgggtgtgggtcgaattcggtttgcgcgtagattgagaaggaaattcgagtttgtagcgt

SEQ ID NO: 11472 - DNA, 699 bp, Artificial Sequence
  Description of Artificial Sequence: Synthetic polynucleotide
cgcgcgaatcgttttattttggatttttggaatcgtgtttaggtattcgggcggcggggttcgtttaggtcgcgttaggtagttttgggtcggtgggtgtcgggtttttttttttttcgttttatttggcgcgttcgtagcgtcgtcgtcgtcgtcgtttttttttttagcgggcgttcggagtatttcgcgtcgcgtttttttcgtttcggttttcgttcgtcggagcggggtttacgtcgttggtagttattaagtggttcgttaaggaaatgtaggtgagtgcgtgaggtcgagcggtagttgttggagacgtggggtgtgtgtttgtgagtgcgagcgagacgaggagggagcgttagcgagcgagcgagcgagtgcgggagcggtcgtttcggtttttcgtttagtcgcgttcgtagtcggcggtcggagcgcgtgggggtagcgtttcgtttcgatagagtttcgttttttttttgtcgtttcggttgttttttcgaggagtcgggagtcgtttatcggtttttttaattttgcgttttttttttagttcgagttttttcgttgtttttttttttttttttttcgagtttttttttttttggcgcggcgtcgttagttagtttcggcggggagagtgtaggtattttgtttttagaataattagtaggatttaagtcggtttttcgagcgcgt

SEQ ID NO: 11473 - DNA, 1191 bp, Artificial Sequence
  Description of Artificial Sequence: Synthetic polynucleotide
cggagcgggcgaggacggttagtttttgtagtgtttaggtttgtacggaagcgttttggtataatttagttgaggatatacgttttttttcgcgtagtcggagggttgaatagtaaagtatttttcgggggaattgtgtgttagcgtagtttggagagagtaggtttagggggtagttttattataggagataggatacgttttagtttgggtaaattttcggttttttttggttttaagttagtagtcgtcgttcgcgatttttttttttttttcgtcgttatttcggtcgttttgttagtttcgaatttgttcgcgtttggtcgcgcggttttttagtttacggggttggcggcgcggttgggatgggatcgatgtggcgtatgcgtggtggcgttattaggcgcgggagttgttgcggcggggacggtgttgcggacggtcgagggttaggtcgtttcggtcgggtttgtggtgggggtagttttagcggcggcggcggcggcgtgggttggcgaggtcgcgcggacggcgttcgatagtagttggaggagcggtttgtcgatttggcggcgagttatttggaggttattcgtgcgcgggacgagtgggatcggtagaacgcgcggttgcgttaggagaacgttcggttgcggttcgagaatcggcggttgaagcgcgagaatcgtagtttttttcgttaggttttgcggtttttcggcgaaggcggtaacgggacgttcgcggaggtacgtcgggtttttgaagaggttagtacgaatcggagggttagagatagcggtcgagaggacgagtcgggtagttttagggttttgagggttcgatttgagaagttggaagttatgtatcgtcgggttttgttgtagttgtatttcgagtagcggggattacgttcgagcggggataaggaggagtagtttttataggaattcgatttcggttttcgttttcgggattcggagttttttgggttttggttgtagtcgaggtcgtagtcggtgagaggcggagtttcgagcgggttttttttttttcgtttttagttattttcgatttcgcgtacgttttggttcgttttttgttcgcggatattttggattacggtgttttttcgtttttattagtggatattttcgggtggcgtttggttattcgtttggtggaggtcga

SEQ ID NO: 11474 - DNA, 536 bp, Artificial Sequence
  Description of Artificial Sequence: Synthetic polynucleotide
cggacgggatgtaaagtttgggtgagacggttatcggacgtttattggaagggtgcggggatttttacgtcgatatttcgttttttcgttttagttcgcgtatttatcgcgtacgtagagtagtgatatggtcgaggatcgggtaagtttttgtcgcgttttagtcgcgtcggatcgttttttttttttttttagtaggtgtcgcgattgttttcgttatcggttttacgggtttggtagttttttatggtttcggtcgtaggtagcgtttcgtcgttgtttcggattcgttttaaattttatcgtttgagcgaatttcgggtagcggtgagtatcggtcggtaggttggggattgggcgcggtatagcgacgttatcgttgggaggtaggagttgtcgggattttttttcgttattttattcgggattcgcgcgagcgtttgggcggagttaattcgtggtgtttcgttttttagttaattaatttacgtttagtttatcgatttcgttttttttcgcgagtacgtaggaggcgg

SEQ ID NO: 11475 - DNA, 728 bp, Artificial Sequence
  Description of Artificial Sequence: Synthetic polynucleotide
cggttaatacggttaggtttttcgggcgttttaaggtttcgttaattttggtaaaggcggtgttgaggtgaattacgtggatttgaaaaggatacgagggtaggagagggttacgtttttggtttcgtttcgtttcgtttttttgttttttttcggttagtttcgcgtttatttcggtagggaaacggtggttttttatagtgtgtttcgagttcggacgatttgtagttttttagtgtagatgtagttgtagagttcggtattttcgttcgggatttagagttatttttagtttaggaggtagggttagttgtattgcgtagggagaggtaagtgagtcggtttcgttcggtagggttagtttaattttcgggtaggtattgtcgcgacggtttttttttttgcgtttcgttttatttttaagtttcggcggggagatttttttattattgtggttattgttgcgtaggcgtagttttgggagcggcgggagttggaagtttaggagttttagggggcgtagggtcgggtagaaggcggcgagttgggggcggatatttatcggggattggaagcggttcgcgtaggttggggatattcggggttagggcgggtcgtttggggtgggagagtatagtgaggaagtttgacgtttaggttaggaatttagggaattcgggtagaaaaggtgagggggtgggacggtgggcggcgggtgggacgttcgg

SEQ ID NO: 11476 - DNA, 1431 bp, Artificial Sequence
  Description of Artificial Sequence: Synthetic polynucleotide
cgagttacgttgtttttttgggagtttatcgtcgaaattaaagttatttttcgtcgggagtaggtaaaaggatgaggggaaagaaaattaacgaattatttttaggaattgacgtttttgttaatgattcggaagaaataaacgtagttttttcgtttcggttttgggttagtttacgtgatttttttgggaggttaaagagtatcgttttgttttttttgttgttaagttaagttattttacgcggcgtagtttcgattttttcggtttcgcgtagttttttttttaaattcggagaataagttttatttttttcgaaatgagaatttttttattggttcgaatgtgtagtttattaaattaaaggggcggggaatttttgtttttattggtttttttttttcgtaattttcgttttttgttgagcgagtttagtttttttttgagtttagagcgttttttattttgtcgggcggtttttgattggtggaagtgaggtaaggttgggtttcgttttttttttcgttcgttagtaggttggagtcggggttagttttggtatttttttttagttagtggttaatttttggtttagtggggattgtgttcgtttttttcgtttttttttagtttttttttcgttatcggaacgagtttcgcgtttggtaggttgaggaggagtaaagaaagtaggattaaagagaaggaagatttggttaggtttgggtggcgtttgtagtgttagaaagggaggcggtggcggcggcggttgcgattacggtcgcgcgggacgtgaggttcgagagtaatcgacgggtagcggcggtcgttttagcgtttcgtatcggggtcgttagttagtagaacgcgagtttttgtggaggagtagggtcggcgcgaggcgagattcgggagcgtgagcggggtttttggggcgtcgtcgttttttttcgtttcggcgtcgggggttgtagttttggttttcgtttttttgtcgggttagtttgtaggcggagagagtcggacggcgttcggagcgcggatttcgttttgtggaggatagcgcgtcggttgcggttttttttcgattttttttgttcggcgtttcggttcgggtcgtttaggtgtaggtgcgtgcggtttcggggtttggggacgtcgtagttcggttcggggagggggcgttaggtcgggagtcgtagcgcgggagggacgagttcgggtcggcggggggaggggagcgggaagcgtttttgttgttggcgatcgggattttttttcggtataggggaaaggcggggaagttattttttatcgggtttgtgtttttgagaggattttttgatggttgcgtgaaggggagcggtaggatagtttttgcggttcgtggagcggtcggagttagggggtgggggagggaggatcgatcga

SEQ ID NO: 11477 - DNA, 588 bp, Artificial Sequence
  Description of Artificial Sequence: Synthetic polynucleotide
cgatttattttgcgagttcgggtgggagttttaggtttgtaggggtcgcgtggcgttatttttcgatcgcgatttttaatggcgagttcgtgcggtttttagtgcgtcgtttttttttgcgggtcggtggggtttgcgagaattcggggttgggggcgggtttggtagtggcgggcggggatttcgggtcgggatcgagaagcgttttcgaacggtagttatattggggttgtttagtggtttgagtttttttttgttttttttttatatttttttgttttggcgcggggggttttcgcggcgtcgaggtttcgttgcgtcgtttattcggagggaggagggtttttgggaggcgtcgcgtgggggcgcggttcgtggagttcgggcgttagggatcggtcggggtcggcgtacgggtgcgttttgggttcgttcgggtcgtgggagttagggagttagggagttagggatttcggttttcgtacggggtagataggggtagcgcgggcgattcggagcgtttgcgttttcgcggttttttttttaatagggtaaatttaggggtttgatttcgcgtttgttttgcgg

SEQ ID NO: 11478 - DNA, 1203 bp, Artificial Sequence
  Description of Artificial Sequence: Synthetic polynucleotide
cgtttttttgaagttcgttttttagcggtttggagttcggggcgtggtcggttcgaatttgttttttaggtttagaacggagttcgtagttcgtaattcgttgtggtcgtagcgggtcgcgtttttcgttttcgttttaggagcggtcgaggatttgtttagttgcgggcgttaagttttggtcgtattttttttttcggcggagggagtcggttggcgttgcggtttttaaggcgcgcggacgtcgcggagggtagttagtcgcgcgggagcgggtagcgcgcgcgagggcgttgggcgtcgtcgcgaggcggggaagcgcggggtcgcggcggtgcgggttttagggcggcggtcgtcgtcgtcgtagtagcgtttcgagcggggagggtcgaggaggttcgacgagttggggatggagagtatcgggttttttattgttttagagcgcgtgtgcggttttgggcgcgtatagtgacggtgacggtatttttggttcggtagcgtcgaggtcgtttcgttagatagttagcggtcggcggtaggtcgggttatgagcggtaggggtcgggtcgggtttcgttgattttggtttcgcgcggtagtttttttagttttcgtttcggtttttcggtatgagagttcgttcgggttcggggttgcggttgttttagattcgtcgtacgttggcgcgtttcgggttcgcggagtcgcggtgttgatatttgcgtcgtattgcgtcgttcgttcgttcgttgtgtgtttcgggggcgcggttatggaggtggtgggtgatttcgagtatagtaagagggatttcgtgggatacggggttttcgtcgtggtttttcgggggcggtatcgttaggtgagcgtcggtcggggcgaggtcgggtttcgggcggtaggtacggggttaggtggttttgaaatttggcgtagtcgcgagtcgagattttcgattcggttagtcgttcgggtatgttattgtgcgcgtagttcgtttcgtcgtttgttttggttttgtgagggttgttgtgaggtttaagtttttggtagcgtttcgtttatcgatcggttgttgttgatttttttgtgtgttcggggtttatttcgcggttcgttcgtaggagcgtttgtatttaggttattttggatttaaaatagacggtattgtatcgtgtagattcgagggttgggcgt

SEQ ID NO: 11479 - DNA, 5370 bp, Artificial Sequence; identical to SEQ ID NO: 7304
  Description of Artificial Sequence: Synthetic polynucleotide

SEQ ID NO: 11480 - DNA, 1691 bp, Artificial Sequence
  Description of Artificial Sequence: Synthetic polynucleotide
cgagaataaacgttagtttttatttttgtggaacgtttaacgtagttggttgggggaatacgaggttttgtagggagcgagtttcggtttcggtttgacggaatataggcgacgtacgtgaagtttaggttttattttagcgtaggcgggtttttagcgatttatagttgttatatattcggttagcgtcgattttcgaaggcgtattttttatattttatttcgagtatcggttttatcgttagggaaggtttttttggatagtaaggtcggggtttaggatttgcgagatttattttattcgtttcgttagagtttaggagtagtaataggtttgcgtttttttcgggcggcgttttgtagattttcgacgggttaagggtgtttttagtttagtcgtgcgtttaggtcggggagatgggcggaggattggggttttcgatttttttgatagtttttgcgcgttagaaattgagtagatacggggttcgcgttatttcgttcgtcgtttgttttatttcgcgaggttgcgtttttattcgggttcgggagggtcggttcgcgtttcgggtatgaatggggtttttttttttaatagcggggaaatttcgttatcgttttttatttcggttttcggagttcgcggtggcgtaggtttgtttagtaagtttttgaatcggtagataaaggggtatcggaggaaaagtcgagcgtttttttaaatttatcggttatttttttttttttaaaataaaggagtttttcgtcgattttcgttttttttcgtaaggcgcgtcggtatttcggggagcggttatttcggggtattgtttaggtttttgggagcgcgtcgtattttagttcgagcgtcgcggggatagttggcgatttgtatttataggagttttaggggcgggtggagcgttcgggcgtttcgagtcgtcggtcggattttggagggttagcgcgggattcgttttttcgtagaagtttgcggatttcgcgttcggttcgtcgagttttgcgtatttatttcgtcgcgagtagcgtaatttgtggcggcgtcgcgcgttcggtcgcgtttcgaatttttttttagtcggtagttttcgagtttcggtcgtgcggcggtcgaagagggttcggcgtttcggagtagtcgcgcgtcgttttcgggtcgttttcgtttcgtcgtcgtcgagtttcggagagagcgcgggcgttggaaagtttcggtggcgaatggcggtttgagggcgttgcggcggcggcggggcgggggcgttggcggtttttcgtttttaagcgcggagtgggggcgttgaggcgggtgcggcggcggcggcggcggtagcgggagagggcgggatagcgggagggattggtacggatagtgatttttacggggagttgtcgcgagcgcgcggattttagttaggaggatcgttaggggttcgttttcgtcgtcggttttttttttacggtcgtgggaggggattcggcgtattattcggtttcgtttttgcgtttcgggggagtcgcgtttcgaattagttttttttttacgagggtagggatttcggttttgtttttttttcgcggtttttagtggggattcgcgttttaatttagtttttgttttacggtcgggggattagcgtttttattaagttcgtttcgtttttttacgt

SEQ ID NO: 11481 - DNA, 1223 bp, Artificial Sequence
  Description of Artificial Sequence: Synthetic polynucleotide
cggaatgttatttgtttcgattgttttcgggtggttataggcgcgggggaaggcgtagggttaggggcgttgagggtgaaacggtttcggcgttcgggcggcggcggtggtcgtttgcggtagtttagttgaaacgtagcggaaattgtagttagttacggggttgcgggaggtaaggtaggaaggtggcgttgtcgtcgagcgtttggagttcgagcgtttattatggcggtaagggtaatggtcgttacggggagcgagtacgttttttcgcgcgtatacgtcgtcgcgtcgggttttcggggttcgttatcggcgtcgttgtcgtcgtcgttcgtttttttatttttttttacgggttgtagcggaattttttttttagatatcgtttttaagatggcggttttttttttcggtaattttttttatcgttttttgtagtaggcgtcgagtcgtcgttattttgtttttcgttttttttttttttttatcgatatttatatagcgaaaatcggttcggtcggtttgcggtttttattttacgtttgtagttttcgttttttcgttaggttttatttcggcgcggtgttttaggtcggtcgcggagtcgattcggggtttttcgatcgttttcggtataatcgggcgatttttttttaattttcgttcgtttacggagcgcgttttcgtcgtcgttcggggtagtcgggttttttttcgggtttaattgcggttttttcggggtttgttcggcgtcgcgcgttacgtcgttcggtttagcgcgggagggcgttttgcgggtcgtcgattaggtcgagattaggtcgttgtgcgcgtattaggtttcgcggtcgcggcggtattcgggatttatcggacggacgtgcgggcggtcggcgacggtggcgggtgttgtaggtcggtttttttttggagtattgggtcgggtttcggttggtggggcgggcggagggagggaggaggggtcgagttcggagttgataaaaagcggtttagtttttcggtacgggttcgtcgttagtacgttacgttatcgttcgggagagagatttaggaaaatgcggaagggtagataggttttttttttcgttcggtgggtttttttggtatttcgtgtcggcgtcgttttcgtttcgcgatcggggagtttagtggtttcgttgcggcggggttttcggcggtcggagttttcgtgatagcgt

SEQ ID NO: 11482 - DNA, 1103 bp, Artificial Sequence
  Description of Artificial Sequence: Synthetic polynucleotide
cgaggtacgtattaggggggatttcgtattcgtagtttttcgtttcgtatttcgtagttcgggacggtttttggttttcggttttagcgaggtcgtcgaagtcgtagtatttagttttggaaggttaggtagtcgggatcgtagggattagtttcgagcggcggcggcggcggggtagaagggtagtcgttttttcgggatttaggacgtcggcgggcgggaggtatatacgcgcgtataagcggaaagaaagcgggtttattgcgtggggatgttcgttcgcgtagttgtttcggcggcggcggtcgttgtttgtatcgaggtcgaggcgcggcggtggcggcggcggttgcggattgagtttttttcgtcgggcggtggatgtagggcgcgggaggggcgcgaggggaggggtgcgcgtttgggaggcggggagggaaagaggggaggaagtaggagcgcgggggcgggcgcggttagttaggggcggggcggggcgcgcgcggggtcgggttttgtttattgtacggaggttgtgtgcggggcgcgcgcgcgggagacggtcggacgggcgtggggagaggggcggtttgttacgtatttcgcgcgtttacgtgttttcgttattggagagggtcgggtacgcggagagggtggttgcggggacgcggtggtaggttttttttcgaggatcggttcggattcgaagatcgggaggagggcgggtcgggggcgtttcgggttttttttttcgcgtagcggtttttagaggtttgcgggagttacgaattattgtaggcggttggggttggggaggtgggagtaataaagatagttaagtgagggtggcgtttcgttttatcggggttttcgttaatttgcgtattttttgaaaagcggtttcgtttcggggtttacgtcgtttcggttttcgatttcggaattcggtggtttgtagcggcgtcgaaaggtttatcgacgatttttttttttagtagtaagtcggagggagttaaataagttttatttataattttagtgttattatttagagcgttttaacgttatttagaaagtatcgatggtaaagcggcgcgtggcgt

SEQ ID NO: 11483 - DNA, 616 bp, Artificial Sequence
  Description of Artificial Sequence: Synthetic polynucleotide
cgtatttaatggcgattcgatagttttatttggtatcggtgttcggttcgtggggcgggtggagggtcgggtagtcgtagggcgcgggttttttcgggtggacggtgttcggtcgggtcgggtcgggtcggggaggtaggcgcggggcgcggggcgcggtgtatagcggggagcgcgtagggaggcgaggaggcgcggattgggtttcgttcgtaggagaataaataggtttttttcggtcgttcggagtttcgtttttcgttttttttttcggtcggtttttttttttgttttttttggggtaggtagaggcgtttggtatatttcgtatattttttcgttagcgtttttcgttcgttcgttttttttcggtttcgtttcgcggggttgttggagaaattaagtttggggttttttttgtcgagtacggggcgagttttagaaggttttgtcgtgatggaaaatttttaggtaaattttttcgggttcgtggtttttaggtcgggaagttttcgttacgtgaagggttttcgtttttagttgcgcgatttggtttcggtatagggttaacgatttttatagatgttgtcgggttaatttagtcgagaattatcgt

SEQ ID NO: 11484 - DNA, 206 bp, Artificial Sequence
  Description of Artificial Sequence: Synthetic polynucleotide
cgttaaaggcgacgtgtcggtcgttagttttaggtcgagtttcgagcgtttgtaggaatacgtttttttattcggcgcgggacgtagagttgcgagagaattttgtttagcgcggatttaacgttagggcgtcgtttagaggttggtttttgtttcggttttattcgtcgggagattatagagttgtttttttagtcgttcgtcgt

SEQ ID NO: 11485 - DNA, 1141 bp, Artificial Sequence
  Description of Artificial Sequence: Synthetic polynucleotide
cgtattaattggcgtgtgtaggcgttgttgtttcgcgttgcgtacggagaagcgtttcgaatttatcgtacgatgcggagttaggggtagcgagtgagcggcggtttttagtttttttttgttttttttttgttttttttgggaatggtagggggttttttatgataaatgttcgtaaataggatagggttcggacgattttagagtcggcgttttttttttatatttttagttttagggtcggattcgttttcgcggttgttatcgtttttgtttcgggcgtttcgcggggattatttcgttaggtgagcgtttttaggagtttttttgaaatttatttgcgtgaagtataagtttattagcgtgagggtgaaaaattgtaggtatatagggaagtagtagagtagttagaagacgaaggggttgagcgaattggtcgttacgaagtttttgaagtagaaggagaagaggacggttcgtagggaggtttagaagaggtagagaaagaggaagacgttttggtagttgagtcgtttgtggcggtaacgtagtattagttagagttgtacgtagatgaatacgaagagtagcgcgtagaatacggtgtagacgacggtgaggttaagttttacgtaggggggtacggtcggggttagcgtgggcggtagcgagtcgttgcgggttgggttttacggcggggtttttatcgggtcgggggcgttgtcgcgcggtcggggacgttcgggttttatcggggtttacggtcgtcgtcgttttcgcgggggttttcgcgtatcgcgtttagtttgtagtttcgagattggaggaaagaaaataagtcgtattttttttttcggtattatatgatttattgggacggtttttgtttgcgattggtagcgtcgcgttcgtcgttttcgcgcgtcgatcggtttcgcgcgttttcgtttcggttcgcgcgttttcgtttcggttcgcgcgtttcggttcgttttttttcgggtatcgcgcgttttcgtttcgcgaatttcggttcgttttattttcgttatcgcgcgttttcgtagtgcgcgtttttagagtcgtacgttttttttcggttttttttttattttcggggtcgcgcgtttttagattgcgg

SEQ ID NO: 11486 - DNA, 1819 bp, Artificial Sequence
  Description of Artificial Sequence: Synthetic polynucleotide
cgcggacgtaggacgtagagttttagtatcggtagttaagaggacgtaggaaagcgtacgtatttataggtttagagacgcggacgttagatttaggtttggatagagtagtttcgtaagttttaatatattttgtaaatttcgaagataggagagagttaaaatattttttttgttcgtacgtaggttttttttgttttttacggttcgattttgggaggcggatgaggatatttttaggtttggatgggggttatgggatattttattttagattttgttacgatttgggttgtgttcgttcggtgttttcggtttacgggttgtataatttggcggtttcgaaattggcgtgggggaggggagggttgtttattcgagtaggacgcggttgtttatttagtcggaggtgaggaacgatttttttatttcgttgtcgggtttaagcggggttcgagagtcgtcggggagagttaaagggaggggatcgatggattttttagagtgaaattgtgcgttttggagagtttcgaggtagtttcgcgagttttcgaggaggtcgttgtcgtttggtaaatataaataataataaaaggaaggaaatttaggcggtagtgcgtagaacgagtatagggttttgtgagggcgcgtagggtttacgcgggtgtttttaatagggttttttacgtaggcggcgcgggtacggggtcgggggcgcgcggcgtttttagcgggagggcgtttggattaggggtttcgtttttttttagcgtattttcgtttttttttagcgtattttcgtttcgcgttaggtttattcgtagggttttttttagtacgttcgcggtcgtagtagttagtttagtatttattttcgaagttcgaaatgattttatttagttgcgcgttgatcgcggggttcgatatgatggttggtgggtagcgggtcgcgcggagggtagcggcgaggaagcgttttcggcggggttcgggttttgcgcgttggttggggcgtcgcgttcgcgtttttgtagtgtagagttagtcgtcggaggagtttttaggttttttggtttagttgaatgaatgggggaggaaggcgggcgtcggttttttttcgcgcgttgcgttttcgtttcgttttcgtttttcgggcggattaggttttcgtattcgtatcggtttttttgtttcgtattggttgtttcgttcgtttgttaaggttaggtttggggggttggggttcgagtggtcgttgggggatagttttgggtatacgatcggagcgtttttttttttttcgtttggttcgcgtttaggggacggcgagagacgcggttttagttttttttttcgggcgtttcgttgcggttagatgtgggcggatgtggaggtcgggttatggcgaggagggcgggcgtttagaggggaagagattttttttttttttcgggcgtagggtttttttgtaggaggttgtatttgggtagttaaataaagttttttgttatcgtcgtcgcgcgttttgcgtttgtaagggttaaacggtagcgtacgcggttggtaggtaggatttcggtttgtgggtttaagagtcgaggggcgtagggcgaatatgcgagttttatggtattagcgagaggttattaatttttatttatcgagggtatttttgtagttaatatttttattacgattatcgtttcgggggttatcgttgtatttttttgggtgagttttggagaaggtattgttcgggagaaggggtatagggcggggatggaatacggttgttagagaagttagggacgggcgacgt

SEQ ID NO: 11487 - DNA, 1813 bp, Artificial Sequence
  Description of Artificial Sequence: Synthetic polynucleotide
cgagtttattttattaacgttaaattcgttagtttcgttagtcggttgtaggatcgagggagggtgtaaaaggcggggggcggagggggggtagattagattaggcgaaatttaataagtttttagttttttagtttaaagtttttattatcgtcgttattaacgagttattttaattgagttagtatcgtcgtttattcgtcggttcgtcggaatcgcgtttattttttgtaatttcgttcggatcggtatttcgttttttcggttcggttttttttttttcgtcgggtgtaaagttaaagatttagtaaggcgacgtgaatttttgtatgtagggtatatacgtcgttttcggtttcgggagtgcgggggttcgcggcgcggagggaggttgggcgttcgggttttcgggttaaggtcgtcgcgcgtgtttatttatgtttcggcggtttcggtttcgttggtttcggcgttcgtttagatttcggttttcgtcgttcgttcgagtttttaaaggtgttgttgcggtaattttatggcgatgagtatttgttaaacggcgagtcgcgagttggtcgttttagttcggggggcgtcggggttttcgggcgcgcggaggcggcggcgagcggcgggcgtttcggtcggtttcgcgtttttcgttcgattttgtcgttttcgtcgcgttatcgatttatggagagagatattaagggggaaaatggcgttttcggagttcgaggagttttggagtaattatatttatatatatacgttcgtacgtatatatattcgtatatattggtatataggcgcgcggcgagttttgttaattttagtaggagttaaaaaaaattttatatatatatatatatatatatatatatatatattttcgttttttcgattaatgttttttttttttttgtttttttttttttttttttttttttttttgtttttttttaaaggatgggttggagcgttaaaaaatgttggtgggtttgggttcgtaggaggcggcgcgcggagggcgagggcgtttttgttgagttgtgtagttcggttcgttgagttcggcggttttgttcgttcgttcgttcgttcgcggtcgttagtgttgtcgtcgtcgtcgtcgtcgtcgtcgttgttgttttatggtcgcgttcgtttcgcgttttcgtcgcgtttcgtcgtcgttcgttcgcgttttcggtgagcgttggagtggggtcgggttcgtgtgtttgtttttcgcgtttttttcgaatttcggatttttagtgaaaggaagggggagggcgcgggcgcggaagggaggtggatcggagcggtagcgcggtttagtcgaacgggtatcgatcgttatttcgcgatttttttcgtagggggcgtcggcgtttaagttgttcgttcggagggtttagagtcgttttttagattagagtcgggggaggcgtagttagtagcgagttttgagcgatttttttttttattcgtttttttgttttagtgaatttttgttagttgaagggagcggggtttttgttcggggaaaaggaaaatagttcgtggtttgggatttgggattttttgtcgtttttagcgtttttttcgtttttcggcgtttttgcggtttagtggtttttgcgcgtcggagttcgtcgcgaagattgagcggtcgcggggatcgtcgcgggtttcgcgcgtatttttgggtttaatattgttattatttgatataataggagtagtgtcgggggggtattgcgcgtttagacgtgagttgtgataggttttcgaaattgggcgt

SEQ ID NO: 11488 - DNA, 1872 bp, Artificial Sequence
  Description of Artificial Sequence: Synthetic polynucleotide
cgtggatagaaagtacgcgtaaggggtttcggggataggaagttattagtttggggagcgggaggtattggatattttttcgtttcgcggtcggtacgggtgcgcgtgcggtagcggcggtaggggtttttcgttttgttcggggttttcggtcgtgtttcgtcgttcgggtcgcgttcggggttgattcgtattattttgtaaggaagtgaacgtttcgtacgggaaggggaggcgtttgcgtcggtcgtcgcgtagtttcggggacgttcggggttgtcgtcggttcggggtcgtagacgatcgcgggacgcgcgagtttttcgtttttttttgttcgtcgtttttttcgttatttttgttcgagaggagttaaattcggtttttagagttcggggagggtggggatattcggtgtttttttcgcgttaggaggaagggggagggcggagaggatttttggttagtttgcgtcgagtagatttaaattaaaataaaaagattaaaggagtagcggtcggggcggtagcggtttttaggtcgggatattcggggtggtgcgttcgggtttgcgggggttgcgtcggcgtcggggaggcggggggagcgggagcgggcgacgcggggaaggggggagttagggggagggcgtcggtcggaggaggggcggattcgttcgttttagtcgagtagagtatagtcgagtcgagcggttcgggcgggggtcgatttcggttagcgtcggcgtagagagcgggcggaggcgtaggttatgttgcggttggtgtttatcggggttcgggttatcgtggatatgtcgtacgttcgttattttttggatttttagggtttcgttattttttaagttatgtagaagttggtggtgattcggttgagttttaattttcgcgaggtcgttattttgagtcgggattgttcggtgtcgtttttcggggacggagattttttcgttcggaatcggtgagttcggcgttttttaattttacgttttcgttttcgtttcgggttcgcgtcgcgtcgcgtcgttttcgtagtttttagttcgttcgcgtgtttatatttcggcgcgcgttcgggcgtatagtttgagtttgcgagatttcgggaagttgaattcgtcgttatttggcgaaggcgaatgtgatgtgattgttgttggtgtgaatattcgatgttatcgaacgtttttataattgagggttattttaatttgggatttttttttttttttttagtttttttttttttttttttcgtttttgaaataaaatcgacgggatttagaaggggaggtttttcgtcgggtcgttcgcgcgtatttatagtttttgcgttgatataatttttagggtggagcgggagtagtttggacgtaaattgcgacgtttaggtaaacgtgtttcggaggaaggaggttgggattcggttggttttttttgttttttttaggttggtagtcgtttcgtagtggcggagtttgtcgttggatgtgtgggtgtgtatttcgtcggtgttgtttgcgtgttgttagtgtagtgtgattgttgtttgttttttgagtgttaacgatcgtcgcgtggcgcgtgtttcgggtagttgggttagggtcggggtgggggtatggttgtttttgtcggtacgttttgtagatatttaggtgatatcgggttgttgcgagattttttggtttttttatttttcgcgttttttatcgtcgtgttttcgttttatttatttttagtaattggcgaagtaatagggaggaaacggattttattttttatcggagttatgttcgtttaggtttttgtttcgtgggtttttggttgttcgatttgattggtaaggcgt

SEQ ID NO: 11489 - DNA, 652 bp, Artificial Sequence
  Description of Artificial Sequence: Synthetic polynucleotide
cgttttttcggtggagacggcgacgtggtttatacgcgagtttttcgtcgaggatgaattattagttagttcgagttgttatattttattttagtatagttatcgcgagagtttcggggtcgcgtcggcgtgttttacgtacgcgtagtttttcgcggggtcggttagtggtgtcgtcgaggcggggggagtggtcgtcgcgtcggtcgagtgaggtagggttatacgtaggcgtattcgcgcgtcgatagttcgtgtatcgtgtggtagcggttgtgcgcgtttaggaaggatatttcgttttcgtaggtcgtcgggcggtagtagggttgcgcgcgtattcgttttcgtcgtaggcgtcgtcgttggcgtagtcgtcgtagttcgaggtcgtagacgcgcgcggtagtttcgtaggcgtttgcgtagtagcggaatagtatcgtttcgtcggacgcgtagtttaggtttagttcgtttacgcgtatttttagttcgcgtagttcgtaaggtcgcgtttttaatcgcgtacgcgcgcgtcgtcgtcggggtttcgttcgacggcgcggatttgggggtcgtttagtttagggcgttagttcgcgtagttttatcgtattcggggttttttgtaggagtgtacggtttgcga

SEQ ID NO: 11490 - DNA, 722 bp, Artificial Sequence
  Description of Artificial Sequence: Synthetic polynucleotide
cgtttttcgtagcggtgtagcgcggtcgtatttcgtattcgttgtttggtgtcgtggtcgttttttcgggtagtttttcgggttcggcgttggcggtagtggcgagcggcggagattttttttcggggtagtcggtgttcgaattgatcgcgtagttgttgcgcgttgagttttattttgcggcggtcggacgtttcggcgtagggggcggcgcggcgggcgcggtgttgggtatcgataacgtgtgcgagttggcggcgcggttgttttttagtatcgtggagtgggcgcgttacgcgtttttttttttcgagttgtcggtggtcgattaggtggcgttgttgcgtttgagttggagcgagtttttcgtgttgaacgcggcgtaggcggcgttgtttttgtatacggcgtcgttattggtcgtcgtcggtttttacgtcgcgtttatggtcgtcgagcgcgtcgtggtttttatggattaggtgcgcgttttttaggagtaggtggataagttgggtcgtttgtaggtcgattcggtcgagtatggttgttttaaggttatcgcgttttttacgttcggtgagttacgtttcgaagagggtcgcgggatggggggatttaagggaggttaggaggagggcggtttggatttagatttcggtttttatagcgtttcgttcgttttttaggtttggggttttgtacgcgtcgtgagtgaacgt

SEQ ID NO: 11491 - DNA, 858 bp, Artificial Sequence
  Description of Artificial Sequence: Synthetic polynucleotide
cgttcgatttaggtttcgagtttttttttcgattttttttagtttaaaggttgtattcgttttaggtttttttagttcggttttttagtttttttttcggttttttttagtttggggttcgggtttttttttcggttgagtagtcgggttcgcgattttttttatttttttcggttcgggttttcggttttttttagaggtgaggtaggggttatttagaatttcgcggttttttattttttttaagattattttcgttttagttttttgttttttattttgtttttttaatttgggttttcgattattgtttcgattttattttgtcgttagggattattagtcgtttttttcgcgtttaggggacgcgtagcggtagtttttgttgatggtaagggtttgcgtattcggaaattttagggtttggggcgtggtgcggtttttgcggttagcgggtttcgtttgagttttagggttttttcgttgttggattacgttttttataggttttagggtcgcggatgaatttcgatttttgttttttttttcggtgttgtggttattgagttaagtttggcgagtcgaggtgattcgggtcgggttgcgggaggagttcgcggtgaggtggtttcgcgttgtcgggcgaggtcggtttacgtggagtcgggagtttgaggtttttgtacgcgggagttgcggacgatggtggttagtgttattgtttacgacgttattgtggtgtgtgtgtgtgagagacggagattttagtgtgtgtcgtgggtgttgtttgatcggatttaggacggtgagtaggggcggggtttatcgtgtgattttggtttacggtgacgtgatcgt

SEQ ID NO: 11492 - DNA, 598 bp, Artificial Sequence
  Description of Artificial Sequence: Synthetic polynucleotide
cggagatacggttatacgagtaattttagcgacgtttttttcgcgcgtgttcgtttcggtatttcggatatttttattttgatagaggtgtagtttagggtttaagatttggttttcgggttttaagtttaatttcgggttcgttagtttagtaggtgcggagttaagtttttttatagacgcggttttttttttacgcgaggtttttaaatttcgtaaattaacggaaatgaagttacgtttcgggagcggtgtttttgggaaatgtagtttagcgtttcggacgtcgtgtttttgggaaatgtagtttagcgtttggttagtcggttagaacgttaggaggttcgggtcgtttatttttcgaggggttcgtgggttcggtttgtggaatttgtttgtttcgtttgtagcgtttcggaggtttttgggagtgttcgttcgttcgcgtttagtgcgtaggcgttagacgtttagggtttgcgagagcgagttgagtggttttagggtttatttttggtaggagagagggtgggattcgtcggttaggtaggtgcgggggaggagttggggtcggtgcggggattcgtcggaatttcgg

SEQ ID NO: 11493 - DNA, 1281 bp, Artificial Sequence
  Description of Artificial Sequence: Synthetic polynucleotide
cgcggtgtcggcgcgttagtagttcgcggttaaggttatttgtttttagggtttcggtatttttgcggggaggcggtaggtagaggacgcgcgcgtagtcgcgtaggagtttttaggcgagtgggggaagtatcgtaagagacgcggatttggagcgcggttattgcgttatcgtagcgatttgggttatttaagtcggcgggattgagaggtcgttgcgcgtgggtaggggtttagattgcgttcgcggtgtttgtttcggtttttatttcggaacgattgtagttttgcggggttcgtcgtttatatcgcgttgaggacgttgtttaagttaggcgttcgttttcgttcgcggttttagtcgttcgtagcgcgtcgtttttagacgcgcgtggttgttggcgagggttgagatcgcgttttcgtcggttagtttttagtagtagcgtattttttttgtttcgcgttttcgtttcggattcgcgtcgtcgtagtttcgcggtgatgagtttcgagtcggtttcgtcgtcgtcgtcgttttagtgttttggttgcgatcgcgcggagtcgatcgtttagcgtttagaggagggcgacgaggtttttcgcgcgggcgattacgagatggtagtcgagttttttcgttttatgttagtcgggttggcgtagtcggatcgcggtttgtgtttgaggttgggggacgcgttggttcgcgtcggtcgttttttcgaagttttgggcgcgtttcgcggcgtcgcgcggttcggggcgttgcggtcggaggagttggaagagttggcgggcggtttggtgcgcgtcgtgggtttgcgcgatcggtcgttgttcgcggagaattcgggcggcgagttcgaggcgttcggcgagggagggtcggtttcggagtttcgcgcgtttcgcgatttgttcggttgttcgcgttgtcggcggttgttgtataagtcggtgacgttgttttgcgggtttatagtttgtaagcgttgcgtggagttagggttcgcgcggtcgtaggtgcggcgcgtgaacgtggtgttgagcggtttgttggagaagtgtttttcggtcgagtgtcggttgcgtaggttggtaggttaggcgcggagtttgtagcgttagtagtagtcggaggtcgcgttgtttaggtgcgattaggttttggagttgggtgagtcggttgcggggcgggttcgttttttttatatttgttcggtttagtagcggggtggggagttggtcggtgggttcgaggttttgggttttcga

SEQ ID NO: 11494 - DNA, 1788 bp, Artificial Sequence
  Description of Artificial Sequence: Synthetic polynucleotide
cgatgtagttcggagagagtatcgttcgcgtagcgacgcgtatagatttttttttggagacgcgtttttcggcgcgtgcggtcgagttcgcgtgaaatgtatagatttttcggtgaggttttgtttacgtgtgattttgagtattgcgaagttttttttttttattttcgcgtggttatttaaagttttgtttatatttcgtacgtgtagatgttaattttatagaaatatatgatgtaaggatagaaatgggaacgattggaggttgattttttcgtgattacgtttcgttaacgcggtgcgtttatgtatacggcgagtaaacgtatatagtcggtaaatagttatttttattatgtttagtttatagttacgcgtggggagaaggtagcggagagggcggcggtggtaggagaagtgggaagtcgcgcgttcgcgtgggttgttttttgatagttcggcgttgttttttttttttttcgggaacggcgtttattcgggggtcgtaggtttacgcgtcgggcgcgttcgggggggtttcgtagcgtcgagaacgggataatgaggacgcggtgataggttgggtttttgtcgcggtagtggcggcggcggtagttggagttgttcgtgtagtttttgtcgcggttatttttattttcgttttttcggtttttatttacgtttcgagggtttttttgaattcgaagatttttttgatgtttttagtttgttttttttaggaggagttgttttcgtcgttttttcgggttatggtcgacgagcgcggcgcggaggagcggtcgggggcgcgttggggagggggcgtcgggggcgcggcgcgggcgtagaggcggcggggatgtcgggcggttcgggttgcggcgtagtttttttttttgtagttttttttttcgttttcgtcgtcgtcgtcgcggtcgcggtttttttttggtttttatttttgttgttttcgggtatagattttttgtcgtcgtcgcgcgtcggtttttttgtcgtcgtttgttagttttattttttgttatttttttgtttttttttcgttttttttttgtcgttcgtcgcgtttttttttatttcgcgttttttttttttttttttttttttttttttttcgcgggtttttcgtttttttcgtgcgtttcggtcgtttttcgtttttagcgcgtcgttttcggggatgtttcgttttttttttaagagcgtcgggttacggtcgtcgtgttttttggagtttcggcgagggcgggtacgggttttcggtaggtgcggggcgtacgcgggagagttttagttttttcgggagttggaaacggagtttagtttgggggcgtcggggttttttcgttttcggcgggagggggcgtttttgcgtggttcggaagcgtcgggcgggcgggggtgcgcggcggtcggatgcggggcgtcgagggcggggcgttttttcgcgttgtggtttgtggttcgggggattcgaggggtaaggcgtggggtggggggggtgggggtcggttgttatggcgacgggcggcggcggcggttgggatggaggcggaggcgggcgggagtttattcgtattgtattaaatcggttttacgttagtttcgggatagattcgcgaggagtaagtcggggagtttttgggcgggtacgcgtaggacgcgttagtagttgtttcgtggtttttttgcgagtaaaattttcgggggtgtttggtagtcgcgcgggcgttttggtgttgggttggagcggtcggcgggtttggtcgg

SEQ ID NO: 11495 - DNA, 626 bp, Artificial Sequence
  Description of Artificial Sequence: Synthetic polynucleotide
cgtgaggattttttcggtatcgtttcgcgcgggtttttgtttcgtgtttaggcggaggcggggtggttattgtttttttttttcgtttcgcgttttcggcggttttttcgcggttttttgcgtcgcgttttttttaggaggcgttttgatttcgtatttcggttttttatttttcgatcgttagttttagggtcgtcgcggcgacgcgcgattttttttttttgaggggcgcgggtttcggacgcgtcgggttttgttaggtatttagtggagggtcggaggtcggcgattagttcgagtttagtcgtttcgggagttggcgcgagtgtcgttacgattttttttgttttttgcgttcgcgttgttcggtcgtcgggcggtcgttttagtttttttatatagttttttaaaaatagttcgtttcgtatcgttttgtaaggtagtagggagattcgtagcgtgttaattcgcgttcgtcgttagggttaagtttcgttttaggttttgtttcgggttttttattggtttttagtgattttatgagttttttgtttattttatatggttatacgcggtttaatggacgtttttttcgagattttacggttgcgcggagaatcgaacgg

SEQ ID NO: 11496 - DNA, 1037 bp, Artificial Sequence
  Description of Artificial Sequence: Synthetic polynucleotide
cgggtttgattttcgcgtttcgttagtaatagttttttttgatttggtttaaggtttcggttttgtcgtttttaaaatcgttcgtaaggtttagtcgttcgtcgggttttttcgttgttttttaagttttttttaattatttgttttagatcgcgttatttgtaatttgtttcgggttggcgttatattcggcgtttcggcgttttttataagtgttttcgtttatgattagcgtttgtaggggtagttcggagttcgggtggggatagtagcgtagtttttggtcgtagcgcggggtgtagacgtcgtacgtttcgttttttagtcgggcgtatatcgagtagtagtcgtagttcggttttcggacgagtttcgcgtatggtatgcgggcgttttcggttattgcggttatcgcggcgggcggcgtaatcggcgggggttcgtaggcggttaggcgttcgggtgtgtagggcgggtagcggaatagtattttcgcgcgcgtttcgtcgtcgtcgttattcgcgtttagtagtagtagtagtagcggtagtagcggcggcggcggtagcggtagcgcggggtagtttattttcggtagtatgttggcggtcggtagcgcggcgtggcgggcgagcgagcgagcgggcgggcgggtaggtggtacggttttgcgagcgcgggagtcgtttttttcgttttttttttttttttcgtcgtcgtagtcgggttttaaagggtcggttttttttcgttttttgttttttttttttttttttttggagattatttttttttttttcgatattttttcgcgtcggtaagtgagtgcgcgtacgttcgttcgtttattttcgcgttggttgcgggttttgggggttttttgtttttttcgggtttcgttttttcgtatttttttggtttgattatgatttttgaaggagaatacggataattcgcgggtttgggtaggatcggcgtggcggtggagaagagcgcgtgtttttgtttgtttttagtttagttcgcgaggatttcgt

SEQ ID NO: 11497 - DNA, 977 bp, Artificial Sequence
  Description of Artificial Sequence: Synthetic polynucleotide
cggttttggcgttaattcgtcggtttttggttttttggttttgttatttttggcggggttgtgggtcggtttaagattataagagggtttcggcgggaattttcggtggtgttcgagggatttaggtaggtcggcgatttttttttaatatattttttgaagttatcgagacgttttgtatttgtcgcgtttttagagtttgtcgtttttaggttttagttttgaggttgcggtgatatttattgggtatttcgggttttgtacgtttcgtaggtcggtcgtaggtagtcggttttgttgttatttttttttttcggtcgttggttggtttttttgttttggaggtatagagggatcgggcgttgaaaggtgtagttttgtttgtggagggatggatattcggagttgaagatagtataggagagaggggatttttatttattagtgaaggcgtcgttagggcgtttgtttttatgttttttttagatttgtgatatcgtcgtgcggtttagattttcgggggcggttgtatgttagggagggagtattttagggttttttgtttttaagggagagggatagtattttttcgggtttttagtttttttgggtgtggcgggagagttttgggcgaggttgcgtttatatttgtatttcggtcggttttttcggttgatttcgttttggttgatttcgcgtatattttttttttagcgttgtaaggatcgtttgaattcgttggttatttcggtgatgaattagtggttcggtgtgaagttgcgggtgatcgagggttgggacgaggacggttattatttagaggagtttttgtattatgagggtcgcgcggtggatattattatattagatcgcgatcgtaataagtatggattgttggcgcgtttggtagtggaggtcggttttgattgggtgtattacgagttaaaggtttacgtgtattgtttcgttaagttcgg

SEQ ID NO: 11498 - DNA, 6206 bp, Artificial Sequence
  Description of Artificial Sequence: Synthetic polynucleotide
cgttacgttatatcgagagaagcggagacgatatttttattcggtgggggcgggggcgaggtttttttagcgcggattcgggttcggggagtgtagggcgtattttttttgtgggtttttaagcgaaggtatagttcgggggtcggggtggagggcgcgttttagtaggtcgggcgtacgggtatttgtaggaggattatttgtttgttttcggatgggtggtatttgttgatgtgtcgcgtaaggtcgggcgagttgtagaaggtggtcgggtagtatttgtaggggaatatttgggcggcgtgtagtaggcgtaggtggcgtttttgagcgtttttgttggcgaacgatttttcgtatattgggtataggtggtattcggcggacgtatttaggtttagtacgtcggttttttcgtcgtcgtcggtcgttttttggggcgttttttcgtcgggttcggggtataaggttagtaggttttcggtcgggggcgttagcggcgcgtttttggtttgtagcgtttggtggtgcgttagtaggtgtttgcgtaggtaggtttggcggcggaattttttggcgtagtgatggtattcgtagagttcgttttcggagttcgattcggatacgtcgtcggggttcggcgtgtttcggtcgttgtcgtcgtcgggtgtttttcgcgttttagttttggttgttgtttttggtttcggcgcgcgggcggcggcgggcgcgggtcgcggtttgtgttagcggcggtgcgaggttaggttggtcgggtagttgaagattttggcgtattcgggatagcggtattttatacgtacgatgcgcgagtatttgtgttgcgttagcgcgaacgggtcggcgtatttttttttgtatagttggtagatgaattcgtttagcggtcgcgtcgcgtttttcgcgcggtttcgcggcgtttttatcgggttttttttgattttgagttttagtacgggcgacgtggttatttcgttttcgaagtgtagtttgcggatggttttgggttttttggcgttcggggttttgattgttttggcgggcggtttcgcggcggtagggggcgggggtcgttttttcgggggtcgtagggcggcggtagggggtagtggggggtcggggttcgggtcgcgggtcgtttcggcgttagtcgagaacgtcgtgtttattttgagttcggcgggcgcgaagagtagcgggtcgtcgtcgtaggtgtcgttttcgttagtttcgttcgcgtcgtcgtcgtcgtttttttcgagtagcgcggcgggcgtggggaaggattcggtcgagatcggcgagtttaggttgaagttgcgttcgaagtatttgtgtttttcgtgttcgcggtttacgggtcgcgtgggattgtagagcggcgcggggtgcgtagtttcggggttgtcgaagtgcgcggttcgcgggttttgcgggggtggttgcggtttaggcgcgtaggtaagcgcggcggcgagcgttgtatgggcgcgtttcgcgggcggcggcggcggtagcggttcggggatcgggttcggcgtcgggggttcggcgcgggcgttttcgtagttgggcgagagtagtagtgcgcggtcgtcgttttcgtcgtcgcggattcggtaggaaacgggcgtggattttttgttgcgttttattaggaagtcgcggggtatgttggcgcggttcgagggtacggtattggttcggtttttttttcgcgttcggtttcggcggtttttagtgttttcggtttattgttcgggcgcggcggttgcgggattcgcgtggcgtcggcgacggttcggtttagttttgcgttttgtacgcgcgtttttgttttcgggttcggtagtcgtttttttttaacggggggagggggttattgttttcgtttttcgttttttttggagttaattagcgcgttcgtagttttttagtttggtagggtgggagggcgatggggcggttaaaagggggtcgggattcgggggtcgttcggtaggtgcggtagatgtatttgagggcgcggggttttcgcgcgcgtttttggtcgtttcgttcggcgtcgtcgtttcgttcggtttaggtatacgttcggtttcgtttttttttacggtttgttgtttttttatggggaggcgtacgtgtttgggttttgtgtttttttttcggggggcgcggagtcgttaaatgggttcgtttattagcgcgataatgtacgtttttttttcgcgcggggattattcgcgggtcgttagtaaaatagtaataaaggagaagaatggttttaaatatgttaggagggtttaattcgcgagtcggagtcgagggggaagttgtgcgcgttgattgggtgggggcgggggcgcgtcggggcggtgcgggggagatcgttgcggaggcgtagtggtttcgcgtggtgtttgggaaataaataagaattcgagagagtagtagggttcggacggttttcgttcggattttggacggatgggtcgttggatttaagaggttaagtaaaagggtttttcggggttttaagtgtggatagggggttcggttttttggtagtggtcgagggcgatgtttgtgttcgtagttttcgcgcgtttacggggttagagaaggtttttttcgagtttgagaaggaattggtacggtttttttagtttttcgaaagcgcgggattggagcgcgggcgggttgggttgggtttttagaggaacgtgaatttttgaatttttgggtttttggaggtttgggaatggtatttttggcggggttcgatttaggtcgttcggagttttcgcgtggtttaaggttcggttaattcgggtcgagttggtcgaagttcgaaacgcgcggtcggtttcgtgcgttttagtgaagttggttttttttttttcgcgcggttttatgtatttttatttcgagcgggtattttgtttgtcggttgatattagatgttaaattaagggttttaattaaggcgttgcgaaataaaggggttgtttgtttgggcgtagtttttacggagtcgtgttttttttatttttgtgaaggaaattaattttttgttattgagtttcggtcgcggttaatttggacgtaaaagagacgcgtgttggacggggggagggggggtaatttgtattttgaggtaggttgaggttttcgagaggataagtcgttttttttgtgttattaggaagagataatagcgaagatttttttcgtttttatttttatttttatttttgttgtcgtttcgtttggatttagattgggtcgtttgtttttattttttgtttagtttagtttcgaggaaatataaaaggtagaattttcgggggatagggtagagaattttacgagtgcgtagtggttttgatcgtttaatattggggaataaatagttaagttatataaaatgttatatgttgtgaggaaaatgttattttattgaaagagaaggaaatatttttttgtaaagttttgtatattagatagattttgttgagttttatttacgtttaattttattgaaggtatttaattgttttggattttttttttgaaaatattttggcgtagaaattaaatatgtaaaaatagagtttatatgagttataagttgtgatggggatagttgttaggtttaattaattaaggggttaattaggttggttaattaagggaaagatatttgataattttatgtttgtaatattttaatttatatattgaaaagggaagaatgtatatagtgaaatatattttgaaaagttttattttagttttaaaaatgttgtggtgagtgttagtttttttaaaagttagaaattttaaaatgagtttatttaaaatttataaatatatttttatttaaaagtaattgatgttatttttttgtttttttgagttttgattaatagtgttgatgaaattagaagtgggaaaaggatttcgagatagttttggttaattttattttttaattacgaattttatttggattgtagaatagtatagggcgggggttcggtttgttttattcggttttgtatatgtaatattttttttatttaatagataatagagagttagttattttgtgaattttttaaaaataataatatttataattgtaaataagtcgtggggatgggaaatcggtatttttattaataaaaaaaataaaataatttttgcgtgagtgaatttaaatagggttttgaatttagttaagggaatttattaaacgttattgagatattgagatttaatgaattcgtttttttttttttatttgtggtttttagttttgttagcgtaaatgaaatttgtttttagacgggtatagttaaaataaatggaaatttgaaaggtattagtattggaaattaattttattattcggggttggaaggagttaggttgcgtacgcgcgtacgtatatattagcgatttttaagtaggtgtagtttagttcgggtcgtggatcgtagtcgttttttgcgtgatttttttagaatttgtgtattcgtatgtatggggatatcgggtcgagatatttgttttcgtttgggaagagtaaagcgttattatagtgcgttttcgacgtcggttttggcgtacgcgattcggagaatgggtcgcgtgaagttaagttgggggaaatagcgcggatttgtttttttttaggggggtttcgcgaaagttagtgaatataaggatttaaggtagagtatttaaggggtttttttcggttttaggtgatttttttttttttttcggggttttggttagcgttttggaaaaatttcgggtttttttatttttttttgcggatttcgcggtgggtttttttttcgacgattgcggagttcgaggttttaggttttttaattttttttattttggtgtgcggggatgtcgtcggggagcgcgtcggggtttattttgatttttattacggttggaaattaaagttaaggtaatagggagtttgtagaaagcgcgaagtttggaaataagagtagaagcggggaatttttgcggaggagttggttttttggggtgtttaggagaataggaggttttggttttacgggaggagtcgggcgggttcgtatttttatttcgtagagggtatcgcgtttggagacgtcggcgttgggggtgaggtgttagcgttttttattattattttgttgtagattttttttttggttttatagaagtttttattttcggtttttagtttttcgagttataatcggtaggaatcgtgcgttatcgttgtagtgttcgtcgttcggagggattagcgtttttttgcgtcgggtgcgttcgattcgagtcggtgagaggttttgtatttgtaggaatgaggggttgttgtgttagttttaggggtacgcgagagatacgcgtagttcgtttggtcgttatttcgttcggttcggttttaggtatttttcgggtttttcgttcgcgggtcgttgtttttgttcggcgtattagtataaagttgttagggatttttcgtttagataattttatataaaaggagagtgtatgaaagagagcgaataagggacgattcgcgaggttgcgtcgtgcgttttcgcggggagggatcgcgtttaagtattttttttttttcgagttttaagtgttttttggtaatttgttgcgcgtttattattcggtcgggggtcgacggcgtggttggttattttttttattttttcgagagtatcgtcggggttattgtacgttttttgaagtgtttttagggttgtttgtttttgttttagtgggatcgtcgggttagggagggaggagagcgggtaggaaggttcgggcgggcggcgggaagggcgacgtcggcgaaagttggtagaggcgaagtttagaaggtgagaaagttataattaaagaattaggttagggagagttaggacggtacgggatttatcgggatgatattgattttggggcgtaagaggtgttttttatttgtgaggtgttggcggtcgttagttcgtgcgtttcggttttaaacggaattgataaaatttagcgaaattgattagaaaggttgcggcgatttcgattttttttttttttttttattttatttatatttgtatttcgtttcgtttgtcgtaggaggacga

SEQ ID NO: 11499 - DNA, 574 bp, Artificial Sequence
  Description of Artificial Sequence: Synthetic polynucleotide
cgttagcgttaacgaatgtggggatagttcgtttggcgttcgcggtcgtatttttatcgggtagtttcgtatttttttttcgggtttttaagtcgttcgtttcggttgcgggagatttcggcgaattatattcgagaggggggcgcgtggggcggagttttttttttattgttttttcgttattagtcgtttttgtcgtcgagttcgtagtcgttagcgcgtttcgagtttttttaggttagaggttttcgtaggcgatggcggataagagggcggggattttagaagtcgcggcgcgttcgtcgttcggttttgttcgggagggggacgcgcgtacggttttcgcggttcgggttcgagaagttggggggcgcgggtttttttatttcgtagcgggtttcgggatcgttttttttttttttgggcgcggggaagcggtttttacggcgattatttcgagtttggaaaatggtcgggttcgggacgaagttttagaaatttgtggtgtagaggggttagggattcgggtaggagttagcgagaaggtcgaggacgcgaataaggaggagggcgt

SEQ ID NO: 11500 - DNA, 3438 bp, Artificial Sequence
  Description of Artificial Sequence: Synthetic polynucleotide
cgtgtttgtttcgttttggtcgtttgaggtcggagttatatatagtttgtatagattcgagatattcggtttcgagtgatttggaaacgagtgtgtttttattgcgtttaaataagacgaggatatttataaggtgcgagtttttaatttttagttattggtaggggttgcgtagcggtatcgtttaggttttttttttaggcggtcgatttatttttgcggagagtacgtttttcgaagagggttgtagacgcgtttttttagtatttaatttgttattttataagattgagttaagttttagttaaaatatatttattttattaaaaataggcggtttaatattacgtcgtattttagttttttcgagggcgtaagagaatagagagtttttagattaattggaggtaaatattttattttttaatatttaaaaataatttaggcgcgtttgtatcggtgtggtttacgcgatttttacgcgcgaggttagtcgggttggtttagcgtagatagcggtcgggatttatttatttagtgcgcgttttttttgtttttcgttgcgcgcgtttaaagttagaaagaagaaggtgacgcgggaggcgggtcgggttttcgggtttagcgaattcgcgatttattcggtttcggcgtttgagtcgaggttttagaaagaattcgttaattttagttattttggatttgggtagggagggtgcgcggtttttaagtttagtttggatgtttagtgcggtgtgtttcggttttttcgtttgtttttcggggaggttttttattcggtggttttgggtcgttttattgtggcgtttttatttttggttatcggttttttttcgtttaggatttttcggtttagggagtagtcgacgggtattttcgaacgttggggtacggaattttaacggggcgattagagcggagttcgcggttcgaggttcgcggttgagtacgaagacgggattcgaggatttgtatatcgttcgaggggaatttgttttgggttttggtgtatatatagtatgcgttttgggttggtttgggttgggttaggtaggggagatttggttgggtacgaggcgtcgtttaagtttttcggtcgtgggtcgggcggtcgcggcgtttttgcgtatagtggttatttggggtcgtattttatgtttgtttgagttttttcgcggcgggttgacgtcgggatttgtttaatcgttataaaacgtttaaataaaaatagggtcggttttttagtagtggagagttattcggagtatcgtttcgggtcggtttcggtttcgaggtttcgggggtttaggatttcgtgcgtgtggcggggaagaggaatttagagtttttgggttgttgtttttttcgtcgtttttattgtgaatattgtgcggtggggtgaacgcggggagcggcggggttagtggagtcgaattttagggttttgcgattgtattcgttaggaggggttttcgtttggtttgagaaaggttttttgaggttaagagttgggtttgaatataattttcggagtttcgagttcgttttttttaatatataaatacgcgtagatttttagaaataggaacgtacgatatatacggttagaagtcgcgaggatatatagagcgtcgtttattgggcgggggtcgtttgggaataaagggtttaggaggcgttgtttcggcgtttattttgagtttttttgggggtgatacgggatgggggtggggtgtaaagggaattgagggaggagagtgcgcgaggaggggaaagcggtgatttggtttagaggtggggcgcgtattttaggcgagcgtgcgtgggtcgggatttgtagggtacgggggtgggtttaggttggtcgttttatttcgttttagcgtttcgttaggttttcgtcgtttcggggtcgttcgggtcgttagttagttgacgcggggggcgggggagttgttaggcgcgtttcgttttgcgtcgttgggtcgcggaggtcgtgtagttattggttcgcgtatcgggtcgttcgggttttcgtattttagtgatattaggaggcgataaaaggttgcggcgtcgtcggatttagtatagttgtatcgtcgagttgcgagcggttgcgagcgagagagcgtaagagtaagagagttagagagcgagtaacgggtattcgttttacgtttttttttagttttatcgcgcgtttcgtttgtttttttatttcgttcgattttattcggttcggtttttgcgcgggtatagtttagagttttggggcggtgtaggtagtttcgggatttttcggcgcgtcgtcgcgtttttagataaaggtttggtcggcggtttcggttcgttgcgttttcgtttttcgtttttttagttttttttcgtttttttttttcgcgtttggttcggcgcgtttcggtcggtcgtaaagtttttcgggcggtagcggcggttgcgtttcgttttagcgatggtcgcggagttgagtatggggttagagttgtttattagttcgttggttatggagtatgttaacgatttcgatttgtttaagttcgacgtgaagaaggagttattggggcgcgcggagcgttcgggtaggttttgtatacgtttgtagttagtcggttcggtgttttttatatcgtttagtatttcgtgtagtttcgtgttttcgtcgtttagttttagttcgatcgaatagaagatatatttcgaggatttgtattggatggcgagtaattattagtagatgaatttcgaggcgtttaatttgacgttcgaggacgcggtggaagcgtttatcggttcgtatttagtgttatagtcgttgtaaagtttcgatagttttcgcggcgtttattattattattattattattatttttattcgtattatgcgtattcgggcgtcggcgtggtttacgacgagttgggttcgtacgtttattcgtattattattattattattaagcgtcgtcgtcgtcgtttagcgtcgttagttcggcgtaatagttgtttattagttatttcgggttcgggtcgtacgcgacggtttcggcgacggcggcgggcggtaacggtagcgtggaggatcgttttttcgacgattagttcgtgtttatgttcgtgcgcgagttgaatcgttatttgcggggttttattaaggacgaggtgattcgtttgaagtagaagcggcggattttgaagaatcggggttacgtttagttttgtaggtataaacgcgtttagtagaagtattatttggagaatgagaagacgtagtttatttagtaggtggagtagtttaagtaggaggtgtttcggttggttcgcgagagagacgtttataaggttaagtgcgagaaattcgttaatttcggttttagggaggcgggttttattagcga

SEQ ID NO: 11501 - DNA, 4088 bp, Artificial Sequence
  Description of Artificial Sequence: Synthetic polynucleotide
cggttcggtttggttcgggatacgtttgtttcgcgtatatatagttagtcggttttgttcgaaacgtattaagtcgcgtttagcggtaatcgttttttttttttttttcgtcgtttttttttcgatttcggcgttacgatttttttgcgtttttttttttttattgtattatttttatcgtttcgatttttttcgaggggttgatgttattagtttttttatttttttcggttattttttttcgttaaagtttttttttggcgaggtttttttcgttattacggcgttttttagcgttattttttttttttttcgttttttttttttttttttttttttttttaataaattttatattttacggaggcgggtttttttttttttattcgttattcggttttttgttttcgaaattttttttttgtcgtagttttcggagttttatgggttttttttttttttttttaatacgtatttaaatttttggcgtcgtgtaggtttcgcggaaaaagagagaaagagagaaagagggggagagcgagagcgagagtaagagagagatattgagcgggtaggtcgggggagggggattcgcgttcgcgtcgttacggtttttcgtttcgtttttgagttttcgttcggtcgaattcgcgtttttgggtttttttttcggtttcgttttttatagatagagttcgcgaacgggcggggggttcgggagcgcgcgttcggggcggggggcgggttcggcgcgcgcggtttgcggggcgtttttcgagggttttcgggtcggggtcggcgtttttcgttcgtttttatttagtagtagtaggcggtgcgtggttcggtagatttgtttgtttttttgtagttgtttttcgatttttttgttggttttacgttgcgtttttttttcgttgcgttggttttcggttttattgttttcgaggtagtttatggcggcggcggcggcggcggggcgcggtcgggttgcggcggcggcgggcgcgggcggttttacgtgggtcgggagggtcggggtagcgtcgggcgggcgggtcgggcgcgggttcggtttttcggtaaggagcgcgcggggcggattgcgggtcgcgggtcgcggggcgcgcggacgggcgggaaggggagggtgtcggtcggatcgaggggcgcgcgtagtttttcgtttttcgagtcgaggtcgagggggttgatggtcgtcgtcgggtcgaggcggattagagtaggagttgcgggagttgttgtcgtcgttgtcgtcgtcgtcgtttttattgtttcggtcgggttttcgtcgtcgtttcgagttaaaagcgtcgcggcgggcggggggaggcggggggaggaggaggcggcggcggcgaggggggtggaaggaggaggaggaggaggagggtcgaggagcggtcgcggcggcggcggcggttgggagggcgggagtcggcggagggaggcggtttttcgggagttcggggagggggttttttcgttcgcgttcggtcggggacgggacgggtcggggagacgttttttatttttcgggttcgggtagtagttcggttgagtcgaggggggagagggggcgttttcgcgttagtgacgatttttcgtacgacgttaacgttttatttttcggatcgcgtcgttcggcgttttcgaggttttttttttttttcgcgggcgtcgtcgaggggttggggtgggcggaaggggagggagcgcgcgttcggatttaggaaaattttcgaaagagcgagagatatagagagttagagagtaggagtgtggaaaaagcgaggcgagtacgaattaaaggatagagtaatcgaaaaggaaaatgtgtttatatatatatacgaatacgaataaaaatttatattatatagcgatggtggtgtttggtggcggtggcggggtggggggtttgattagatgagtcgtttttcgcgttttcggcgtcgggcgttatggttcgagtcgaaggcgtttttggtttcggagcgttcgcggtttttgcgtttggcgcggtcgtttaagtaggagaagaaggcgtagtttaggaatattcggaagtagtaggtcgtttcgaatacgaagtcgtagtcgcggttttgtttcgtgcgtttttgtagtaggaagttgagtatttacgaggggttgcgtatcgagaagattaggaatattacgaggggtaggtgggcgtttagcgcgttagttttgagcggttcgggtcgttatacgatgtttttaacgcgcggcgtcgcgtagtaggcgtcgttttcgtcgttcgagttcgtgttttagttagtttaggttttattcgtgttttcggcggcggcgtttttttcggcgttttcgacggcgtttttttcggcgtttttgtcgtcgtcggcggcggtcgcggcggcggcggtttcggggtatcgggtttttttttgggtttttggtattttttttttttttttttttagtattttttttattttttttttttttttttttttttttttttttttttttcgtttttgttttagtagttttttttcgagttttttgcgttttttgtttgttaggaatttttcggggagcgtttttcgcgtcgggtttttggggtttttcgcgagtttttcggggttttcgttttttcgcggcgcgagcggttttttcggttcggttaacgtcgtagtcgtcgtcgtagtttcggtagttatttcggtagtcgtcgcggtcgtttttttttcgtttttcgtcgttcgggttttgagttttatggttatttttagtatggtggttcggttatttcggggagttcggttcgcgtttggttcgggttttttgtttgttttcggtttcgggttgttcggttttcgtgcgtttcgtgtcggggggtttggttgcggttttcgtcgcgttgtttcggggtcgcggagcgcggttgttcgggtttcgggttgttgggttggttgtttaagagttagcgttaaaaaggatgagtaaacgaaaaagggataagaataaattaaaaagtatttaataatagcgagaaattaaaaagtattaagaaatgttaatttaaaaagaaaagtgtaaaggcgcggatggtaggagtttgtttatttttaggcgttttttggtttggtttttgggtacgttaatggagaagagaaaagagagagaattggggggtgttcggaggcgtttcggggtaaggtagcggcgttcgggcgtttttgttttgtttcggattcggcggtttttgtttgcgtcgggcgattcgtattttcgcgggaggtttcggcgtttttcgatttatatgtgagtgaggtgtatttatacgtaaggtagcgtttgtcggtcgttcgtcgtcgtttcgcgtcgggataggggttcgttttagtcgtcgcgtcgtagttcggagttagagagtaggggagcgtcgcgtcggttagttatttgacgtagttcgtttcgcggtgtcgacgcgattgagtgttttcgtcggggagtagagtttttaatcggtttcgatgacgttttagtttttttagaggatcgatttatagtagcggtttttataaatcgaaggggaagcgcgaaaaatcggtttatcggggacgtatttaaatgggtcgtcgcgtattttgggggtgtaggtcggtgtcgggatcgcgcgggcgtgggtcgggggcgcgggggtcgcgatggcggggggcgcgggcgcgtttaaggcggtgggcgtttaatttcgttttttagatttgttttttaattttcggtgagtggtgtagttttgggcggcgtgtaaagtgtgcgacggcggcgtttatttttgttgtgcgtttttttatttttagttatttatttcgtttttttagcggcgcgcgttcgtcgaggtaggtgttagagagtcgaattcgaattatttgcgacgttcggacggagtttcgtattttcggacgagaaaagtgcgatgggagtgtaaagttttttttgttcgaagtagtaggcgcgtcggtgttacgggagtcgaggagcggtggtcgtggttgtggagtcggtgttcgaggcgt

SEQ ID NO: 11502 - DNA, 522 bp, Artificial Sequence
  Description of Artificial Sequence: Synthetic polynucleotide
cgatatagttttcggcgcgtcgggtattgaggttttggagtatagcgtggggggtttggtatagatacgatttacgatcgggtcgattttcggttagaaagaattatgtttcggtcgttcgggtcgcgggttcgcggtgtatttttgtaggtttttattttgtttcggtagaggtttgtaagaattttgtgggtgtttttcggagcgggtagaggaggagtttagcgtcgaggtttaggcgcgtttcgttttcgttttttttcgtgtttttttttcgttgttttttttttaaaggtcgagatttggacgttgttcggtggtttcggcgggggttttgtttttggtcgttgtttttttgaattttaggtgagaagaataaaacgttttgacgttgttcggttttcggtttttggagaggacgggtcgtttttgtcgagagaattgtgcggaattaggaagcgttggtgttttttcgtttttacgggattaagcgaaattcggttttaaacgaagtaaagtcgg

SEQ ID NO: 11503 - DNA, 2260 bp, Artificial Sequence
  Description of Artificial Sequence: Synthetic polynucleotide
cggtattcgggtcgaagcgtttggttcgcgttttcgcgcgggtttttttggaatcgtttcgggatacgcggttttttcgttgttggattttttttcgagttttagtttgttaggtagggattttttgggcgggcggcggggaagcgtcgagtcggcggtcgtttatatttttttttacgtagtataaaggatattcgtcggtaaatttttttcgtttttgattcgggtcgagtcgggaatttagcgttagttttgtttttggcggggttgaggttttttttatattttaggttatttggtaaacgttttgaggttgttattttttttgggtttaaggtttacgggttgaggtttgttttcgcgtggagtttaaggtttacgggttgaggtttgttttcgcgtggagtttaaggtttacgggttgaggtttgttttcgcgtggagtttaaggtttacgggttgaggtttgttttcgcgtggagtttaaggtttacgggttgaggtttgttttcgcgtggagtttaaggtttacgggttgaggtttgttttcgcgtggatcgtcgagagttcggtagattttttttaaggttttgattttaatatttttagtgttttgttaattatattttttgttttttttttttattaaggttatcgttaagatattttttttttttttttttttcgtcgttcgttattttttttgttttttttttggttttttttttagttttttgggtttttttttcgcgttgttttttagttttagttgtttttttcggtttatatttcggtagttttttttttttttcgttttcgggtattttttttttttggtcggtttttgaaatttagtaggttcggtttcggttattgtttttttttgtttgtttttatttggtttgtttttttaattatcgtttttttatatttttttttttttttttttggtaagggggacggggggaaacggggtattatattttcgtttttcgatttcgttattttttttagtttcgtgagtcgcgttttttcgttttttttaggttcgcgattttattttgaggttttttagatttcgtagggttttttacgttattaagtttgtttcgattttttttcgttgttttttatattttttgtcgcggcgcggtcggttagggatttatttcgaggtttagttggtgggggtgttggggtgcgcgcggattcggtatttacggcggcggcggcggtagtagtagtaggaggaggagaaagacgaggaggaggaggaggattagttgagcggcgttttttttttagttcgtagcgcgtattggttttttggggtattttcgggagagtattaagatcggagattaggcggcgatataggtaatcgttgttgtacggggttgggtttagtcggtttttagaggttagggtagggggaggtaggattgggaaggagggtcggagaagtggggtgtagagggcggggtagcgagcggttaggttcggaggaaggcgttttaggcgtttagggatgtcgtcgttcgggttgacgtcgtcggttttttttttcgttaggcgggcgtttgtagtcgcgggcgtacgggtttcgtttcgtttatcggttcgttgtcggcgttcgcggtgcgtttcgttttgtgtttttcgtagtcggcgtgtatttggtgtaagtaaaggcggttagttgatgggtcgcgcgcggattggttgtttcgtcgtttttttttttttcgttcgatttttttcgcggtttttcgttttcgttttcggcgcggtttcgtgttgggtattatttgtggatcgtttaataaaggcgtagcgcggcggggttcgggtggtcgggtcgcggtcgtcgttttttgtttaggggacggtaggttgcggttgggtagggaggcgaagcgtattgtcggtttttagtaaaagatagattaaaagaaaatatacgttcgtgttaggaggttagttaggtataatggggttttatttttttgcggcgtagaattcgggttcgggggttgagaattagatatagttcggtttggggttgtgggagttaagtttcggggtgaaattcgattttgcgttttaaaatatagggcgcgttttcgggttgtgtgtgcgcgttcgggggcgtttttcgtagatttggttcgggtcggtgtttttgtcgcgggaaggaggattcggacgtttaatttagcggcgaagtcgttttttattggaggaggtttttcgaaaacgt

SEQ ID NO: 11504 - DNA, 1502 bp, Artificial Sequence
  Description of Artificial Sequence: Synthetic polynucleotide
cgacggtgagcgtggagtagttcgcggtttcgttgttttttttattttcggatttttagtttttttagagtggaggggtaagtatatagtaagtatttgatattcgttcgatttttgagttttttatttgtaggagttagggggtttgtttttcgtacgttttttgttggagggaggaacgagggaaggagaaaatttacgttgaggtcgttggtcgattattttttttatttttcggataatattgatgggttttattaaggaaagtcgaattttcgtatgttcgaggagtgtcggaggtggttgtgcgtttagttttttttggtaaagggttcgaagtattcgtttatttaaaggcggtcgagagttatattatttgtttgtatgacgggagatatcgaaacgttttttttgaacgcgatgataaatatttttttttatttagtagcgacgtgtacgtgatagtttttgggttttcgtaattacgtggaaatttggaataggtttgcggttgtatatcgttcggacgtcggggtttttgcgtttttcgttttttttgatcgcggttgggtagtcgagtcgtaggtagttgggggttttcgaacgtcgtttttgtatcgcgtcgtttttgtttcgggtttcggtagttttcgggttttcgtattgttcgtcgcgttttgtttatagggaagcgtttttttaggcggcggcggttttggtgcggatttttcggtcgtagttatgtgggattcgcgggtagttaggtgcgtagcggcgcgggaagtattggggtatttttggtttttcgggttcgttattttttttggcgggaggcggtcgcgcgcggggattggcgattttgaggtagcggtcgaacgggttcgttcggttatttttgtggggtttatagttatttaggtgtagattcgagttagttgcgcggggtcggtcgcgggggacggtttcggttttttcggttcggagggattagggtacgcgttgcgataggattgcggcggcgcgcggtttgtttagtttttatttcggtatcgaagtcgtagttttcgggtttattttcgtatttttaggggttttcgggggttgtcgataggtttttgattagcgagcgcgttttcggggtaagtatttttggcgggtagaaatttgggagcggagtatagcggtgtaagggaatcgtgttaggcgggaagggcggaatttgcggggaatttggagcgcgttggttttttttcggtagtaggaggtttttttttttgttcgttcgattgagggttgttgggttggtttaaattggattgtacggtttattagtttgggtttatcgagtttagggggaaggtagtagtagggatttaaggttgggaagcggagtttttagaagtttttgtttttgtttcggagcgttttcgaatcggagttcggagtttgttgtttgggaggcgcgttgcgtttttttttaattttttgttttcgtttcgcgg

SEQ ID NO: 11505 - DNA, 510 bp, Artificial Sequence
  Description of Artificial Sequence: Synthetic polynucleotide
cgttttttgtcgggagttattcgttagtttttttttttagttcggttgcgtagcgtttttaatttaatttttggatttattttcgttttagtttttttcgtgtttagcgttttttgtaaatgattttttcggtcgggtgtttcgttttttttttcggtttttttcgcgtggtttgtttttcgttcgtttgcgttcgttcggtttttttgtttttgcgtttttatttgatcgtaaaggcggttagggtagttttcgcgcggtttgatagttacggtttttagtttgtttttggacgtgggaaattcgggtttatagcgtttttacgtatattgcggtatagattggcgttttttacggcgtttttattggaaagcgtttttgtggttttggggagagggcggttttattcgttatttttttcggagttgttttcgtttatttttatgggaggaaatcgtagggcgtgtgagttttcgatttttcgtttttattttttttaggatcggtcgt

SEQ ID NO: 11506 - DNA, 940 bp, Artificial Sequence
  Description of Artificial Sequence: Synthetic polynucleotide
cgggtaattgttcgggttttgtttatttttttcgcgggtcgtatttgttaaggtcgtatcgttagcgttttttgtcgttttttttgtatagagattcgcgtttattttcgtattcgtattcgtattcgtatttgtttttatttcgcgttcgttttgcgtcgaggtcgcgtagtttgcgggtagtggcgggggtacgaggatgcgaatttaggcggggtcgggagttgggcgcgttttttagaattttcgttacggttaggtttgagttttatttatttacgtcgtattttttttttttcgtgggggtttatatggtcgtgtcgggcgcggtttcgcgggcgcggcgatcgggcgataacgcggcggggacggtcgcgggttcggttgtggcgtatcgcgagtcgaggcggggacggttaggcggcgcggggtagtgggcggcgtattttttataggtcgttcgggatgtcgtcgttattttcgttacgtttggatcgcgaggtttcgcgggtggtttagtagtttttggcggcgcgggcgaaggttcgttatttgttcgtcgtcgttgttttcgtgtcgtcgtttgtttttttatagtttcgtcgttcggttttcggcgtcgtcgcggttcggttcgttttagcgggttcgtaggacgttcgcgtatgcgttattttttgtcgcgtaggggttcgcgttgttcgggttcgcgtcgtttcgagttcgcgcgcgaatttacgcgtcgttgttgcgcgttagcggagggaaattcgcgagaagttattggattgttcggtttcggatcggtttttagaatcgttggttcggggtttttagttgtagtaaatttcggagggggcgaagtcggttaggtgggcgattttttttattcggattttttattcgttttcgtttttagtgttttttgtttgcgtttcga

SEQ ID NO: 11507 - DNA, 2718 bp, Artificial Sequence
  Description of Artificial Sequence: Synthetic polynucleotide
cgttcgggtcgttttttttgtttagtttcgagcgcggagttgtttaggatttttagacgggtgcgagttattgtttgaagttttttttttttcgtcggaagaggatgtgtttaaaggatcgtcggaaattttggttgaagatcgtgtagatgatcgggttgagcgagttgttgtagtagtcgatttagaagaagaatttgaagagcgggtcgggtatttggtaggtttcgcggtagatgtcgtataggttgtagttgaagaagaaggggaattagtagagtacgaatacgtttatgattatagttagtataaaggtgaagcgtttttcgcgcgtttgggttattttgcggcggtatacgttgttgcgcgttcggcgtcggcgcgataggaagaattcgacggagcgcgagttggcgcgcgataggcggttatcgggtttcggggatttggaggcggttagcgttttcgatttagtcgttttcggtttcgttttttgttcgttcgtatcgttcgcgttttttttcgcgttcgttcgtcgtcgttcgttttgtcgtaacgcgtttcggcgtcgtcgtttttcggtcgttgcgttgttttcgttcggttttacgtcggcgggcgggggcgcgtagtgttcgttttcgtttgcgtttgtcgtcgcgtttagttcgttttcggtagtcggggacgtatcgtcggggtttacgggggcgcgtttttcgttgagcgtgcgcgtgcgtagtttggttattcggtagatgcgcgcgtagattaggtttatgatgaggtagggcgcgaagaaggagtcgatgtaggaggataggatgtattaggtttcgtcgttgaggtcgtattgcgggtaggcggcgtcgtcgggttggcggtagagcgagattagcggcgggaaggagatgacggtcgagatgagttatacggttacgatggtggttttgacgcggcgtggtgtgcgttttaggttgtattcgacggtttgcgttatcgattagtagcggtttaggttgatggtatatagatgtacgatcgacgaggtgtaaaatagtatatcgagcgttaggtatacgtcgtattatatttgttcgaagtattagtaggttatgagttcgttggttaacgagaagggtatgattagcgtggttattaggatgtcggtcgaggttagcgatattaggaagaggttttgtggcgcgcgtagcgttcggttggttagtacggcgattattattagtacgttgtttattacggtgaagacgatgaggaagtttattacggtagttagttttgttatcgcgttcgtcgagtattggtcgcgcggcggtttttaggaagttttcgaggtattggtaatttcgtcgttgtttttttcgttcgcgtcgttcgtattggggttcgtcgttgtcgttatcgttagcgtcgtcgttagcgtcggggacgttatggttttttcgcgagttacgtcgttttttttggagtcggggcgtagtcgcggtagttcgggcgttttttagtcggggtcggcgttcgtatcgtcgtttgttgttcgggcgcgttcgtcggggatcgcggcgtttagtagtcggttttcggtcgtggtggtttcgcgggcggcgcgtcggagagcgtggttgtcgggtttttcgtagttgtcgagcgtgtaagtgtagagtaggaggcgttcggagcgagcggcgacgcggttgcggggggaggggggtaggtttcggggttttcgcgcggtttcgttttcggttcggtttacggggagcgtttcggcgtcgagtttacggcgacgcggcgttcgagcgggcgtgtttgagcggtttcgcggtttcggagtttagtcggggcgtaggcgataggcggcggcggttcgggcgtttcgttttttattcggtcggttagggttcggcgcgtcggggcgtcggtcgtcgttttttcgggttttcgcgttcgcgcgtttttttcgtttttaattttattttttcgggcggggcgtcggcgtcgtcgcgagtttttcggttgttttcgggcgcgggcgtttttcgcggtttacgtttggtcgtgcggtcgtcgtttcgttcgtcggagttgcgtcgtcgtcgtcgtcgtcgttttgcgttgggcgcgagtgcggtcgtttgcgatcggtttttaatttgggtcgagttgcgtagcggggcgggcgcgcggggcggggcgggtcgcgggttttggggagttggtcgggaatcggagttcgcggtcgtttggtcgaatttgttcgcgcggcgtcggggaggagttcggggcggcggcgcggggcgcgcgttcggcgagggcgttttttttagggtcgtttgtagtttgcgggacggggtcgagcggcggtcggtttgggtggtgagttttagaagttgttttttttaagattggagtttttttcgtttttttcggcgtaggtatgggcgtaggcgggggcgcgtatacgcgcgcgcgtagtacgggcggttcggggtttatggtttgatggtagagtaatttttcgtagtttgggggaggacgcgacgttatttgcgtgcgtataggttttgtcgagtttagggttcggattagattttggatcggcgtttttcgttagagttattttcgtatttatttcggttttagttttttcggtttattttttagcgttgttggagtatgaattataattaacggcgg

SEQ ID NO: 11508 - DNA, 2661 bp, Artificial Sequence
  Description of Artificial Sequence: Synthetic polynucleotide
cgcgggtaaagcgtgtttttcggtgggttataagtagcgttcggtttttttttttttcgttaagttgtttgatttttttttttaggcgcgcgcgtatatattatatttatatattttaaaattaagattcgttttataggatttgggaaaagaaaaagaaaaaaaagtttttaattattatttttttttcgtcgatttttttttatttttcgttttttttttagcgggtagttaaggagagttagaggcgggggaggggagagggaggagaagcgacgtaagtgggtagttttttagcgtcggcgaggcgcgggaggaggagaagtagtggggaggcgtagtcgtttatttgcggggtagggcgcggaggagggattcgggttgcgcgttttcgggtcgaggaattaggacgcgttcggagtttcgtacgcggttaagttcggggcgtttttttttttcggtcgggcgaatttaaggggcgtagttttttgttttgatagagttggtcggcggaggcgtgtagagcggcgagtcggcgagttaggttgagaaattcgagtcgggaataaagaggggtcggattgagtgtgtgtgtcggttcgagtttcgggtagaggtatttgggttcgaggttttcgttgtgatttttcgagatttcgtagtgttttttattgcggagttttcgcgtttgtcggtaaaaattttatttttggtaaatttttttttttttttttttttttttcggtttttattttttgttttttttttttttttagtagattaaatgagtttcgagaagaaaaatcgaagcgaaagggaagaaaataagaagatttaaaacggatatttttagcgtgggtggttttttttttttttttttttttttttattttttaggaagtggacgtttcgttattttttgatttttgtatttttttttggggtaaacggggtttttttgtttagatttttttttttttttcggaaaataaattattaagtcggtattcggggtaattatagtggagagggttttcgcggagacgcgtcgtcggatttttttttgtattttggggaggcgtgttttttttagaatcggcgtttttcgcgcgtaaatttcggcgacgcggggtcgcggggtggtcgtcggggtagtttcgtttagcgcgcgtcgcgtagacgttttcggagtcgttagttatcgtagttttcgtcgtttagtgtttttcggtttcgggggcgggcgtttgcgtcggttttcgcgaagcgggaaagcgcggcggtcgtcgggattcgggcgtcgcggtagttgtttcggttgtcggtcggcggtttcgcgttcgttcgtttcgttttcgttcgttgttttgttgtacgaatttttttaatttttttttttttttttatttttgagttatttttttgttttttttgttgttgcgcgggtgtttttatagcggagcggagattatagagtcgtcgggatgttttaatttttcggaggaggtggcggcggcgggggggattcggaattttgcgttacggacgagatgattttttttaaggacgagggcgatttttagaaggaaaagattttcgtcgagattagttatttcgaagaggaaggcgatttagttgatattaagttttttttggtgaacgagtttgaaattatttcggttagtaacggatacgaggtgagcgggtcgttgttttagtttcgagaggcgtggcgggtttttgggaaatttagagagggaggaagggaacgaaggcgttcggtcgttcggttgagggtttcgagtagatttttcgtttgttttggggtgtgtgcgtagttgggttttcggttcgtagtgtgtgtgtgtgtgtgtgtgtgtgtgtgtgtgtgtgtgtgtgtaggatgggaggtagaggggtagggtaatttattttaaatggattagtttagggggttcggtggttgaacggttggttcgcgggtaggaatttataatgtttcgttttcggtttttttgttgggttgaggggtgtcgtgttttaaagcgagtagggttgaataacgttattgataaattttttcgtgggacggaaaataaagtgtatacgttattttttggtagatgtttttgtaaaagtgcgttaaattattaaaggtttaggtggagacgagtagagttataggcgggaggaaggggaggcgggcgtgggttggggtaggcggggtcgtttttattatcggtgagtcgggtcgcggggagtaggtcggtcgatggggcgcgtattcgggttgcgggggcggtgcggggtttagtttttgcggttttagcgtttgggttagtagttgggagttgtgggtgcgtcgagtcgatttatcgtaagggtatattttggttgtatcgtttttaattttagttttttttaatcgttattatttggaaataaatttataatttttatttggggtttgggatcggattaggttttaaatttacgtagaagaaaggcggagaagtagcggaagtcgggtattagttttgtagggtggaaggcgttttatcgggttttttggttcgttgcgggcgatagagttggtaatttgagtagagtaaatagagatacgtgggtgttggttagagaaagcgcggagtagggtcgcgt

SEQ ID NO: 11509 - DNA, 801 bp, Artificial Sequence
  Description of Artificial Sequence: Synthetic polynucleotide
cggttattaagcggttttttcgtgagtttcgtttaatgtttgtgcgtttaaattagtagcgttcgaggaacgcgttaattgggagaagtgaattgagggggttcggcggtcgttgaggaggggagcgcgcgggaggaggggcgaggagttcggaggcgggcgcggttggtagtttagagggttcgggcggaggtttgagagtagggttggaggggcggaggatcggggagattcgttcgcggcgttttcggtcggttttgagtaggcgtcgtggtagcgttcgcgttttttgttcgtttttcgtcgtcgttaggacgtaggttcgcgttagggttggcggtagggttcgtagttgtcggtttggcgtttttatttcgcgtagtcggtttcgtttagttttttcgcgtttgattggtcggattttgtttttggcggaggtaattgttcgcggattttttatttcgcgattttggttttttcgtaagtttttcggattcgggcgttttcggtttttttttatttatttttttgtcgggtaggttcgcgatttttcgtttttcgggtcgtttttcgtcgtattcggttttggtatatttttattatttagttcgggttcgttttcgttttgggtttattttagttttttagcgtcgtttgttgacggagcgcgggagttttaaggggtcggggttattcggtcggcgtgggtggtgttaggttcgggttatatttcggtatcggattcgagttttttagtttttcgagtaggattcggaggaatagaacgttaatttttttcgt

SEQ ID NO: 11510 - DNA, 311 bp, Artificial Sequence
  Description of Artificial Sequence: Synthetic polynucleotide
cggttaacggtattacggaagtattagttggtatagaggttcggtgtaattatcgttttgtatcgtaaaacgggtttaggaagtttttaggagatattagcggtgttagaatcgagaaagtgacgatatagataatttatggatttcgcgtacgggaaacgtttcgttgggcgttaagaacggtgtagtaattgaaaaatcgtttagtgggcgttattggtaaaagcgttgttgtaaaatcgttagtttcgtattagaagtagagtcgttagatagaattcgggatttgaaattatcgaagcggagatcga

SEQ ID NO: 11511 - DNA, 1048 bp, Artificial Sequence
  Description of Artificial Sequence: Synthetic polynucleotide
cgttttcgtaaatttttcgggttttacgttttgcggttattacgtttgatagagaaataattagtattagcggttgattcggttgttcgggttttcgtgtaggcgggcgggagcggataggttttggtacgtatgcgttcggggcgggattgcgttttaggtttgcgcgttgtcgttagattagcgggggggcggggcggcggcggatacgcgttttaggcggtagtcgcgcgagagggattttgtgtttcgttgatttttttcggggcgttttttttcgtgtcgttttttttttttttcgtcgcgtttttgcgaggcgttttttattcggtgggatcgattcggggggatggagggggtacgtttttataatttttttgggatttcgaagagacgttcgcgtgcgatttgagacgtcgttttcgtcgagggtttatgggcgcgtttttataggcgggtagtggacgtgagggcggcgagcggcggggtcgcggcgtttaggagggtcgcgttcgggttcggtttcgcgtaggtcgcgcgcgcgcgttttcgtcgtcgttcgggtcgcgttcgtttcgtttttaggcgtcggtttcggagttcggttcgcgagtagcggcggttgtcggagggacgatgagttgcgcggggcgggcgggttttgttcggttcgtcgcgttcgttttgttgatttgtagtttgtggtcggtacgggtagataacgcgagttaggagtattatacggcgtttattaacgtgacggtgtaggagttcggtcgcggcgtttcgtttacgtttcgtatcgatcgcgggcgttacgggtttgatttttttaaggtcgaggttcgcggttaggtgttggcgtcgttgtttttttacggaggtgagtgtcggttcgggggcggcgggcggtggtcgttgtatttcgcgtaggcggcgggattagggttttcggtttcggttttggttttggttttttcgcgttgttcggtcgatagttttagttagggtcgaggttttcgtcgtggatagttcggtttgttttcgt

SEQ ID NO: 11512 - DNA, 301 bp, Artificial Sequence
  Description of Artificial Sequence: Synthetic polynucleotide
cgggaagtagtaggcgtacggtcgtttggatttttttggaggtgatggtcgagcgtttgttgtaatgcgttaggcgggaagtttcgtcggcgatgcgttcgaagatgtcgttgataaaggaatttatgatttttatggttttagaggagatgtcggtgtcggggtggatttgttttagtattttgtatacgtatacggagtagttttttttgcggttgcgtttgcgttttttgtcgttttttttttgcgttttggttacggtttttttggagttttttttcggggcgggagcggatttcgt

SEQ ID NO: 11513 - DNA, 1395 bp, Artificial Sequence
  Description of Artificial Sequence: Synthetic polynucleotide
cggttttgtgaggtttacgcgggagcgcggaggtttttgggttttagggcgtcggtagatggtttgtagcgtatcgttcggttttcgcgttggttacgttcgttagcgttatttttttttttcgttttttatttttaaaaattcggcggtcgagtagtttcgtatttcggagggttttcggtgtaaaattgagtgggaaagagaaaggggcggagagcgacgagagagggaaggtggggaagaagagttcggtcgttttcggtttttttcggcgagttttgagtttttagggtttattcgtttttttaagtcgaattatagaaattttttattgttatgttaatgacgagaggggttgtggggagagggtttcgaagatttttttggaagaagggaagtttttttttttgttttcgttttttttacgtttattcgagttttttttagttagttttttgcgtttttttttttttatttcgagtttgaagagtcggtggtttagtttcgttttttattacggttttatgcgttttttatagttttacggttttttagtttagttttagaatagaggaggtggtttgggaattcggggcgcggtgttagtcggatttttcgtttttcggttgggcgcgttgcgggttgggtcggcgtatttgcggttattcggcgagttttggtttattgattttcgtttcgagagagtcgggagtttttttttttttttatttttcgttagtttattttttattgaacggtggggagggggcgggagcgggggacgttttttagtttttatttttcggaggtttggcggggcgggtagcggagtcgggcgcgcgtagaacgtagtttttgttttttttcgttttagtattttaaatcggtttttgtagtcgtcgtagtagttgtcgtcgtttaggttgtttgggggggcgattgcgcgttatttagacggcggagcgtcggggatttaaatgttattaaaacggtgatttattattgcggaagtcggtaaatttttgtaggaggtttagttattggttgatatcgttacgtgttttttttttagcgtttttcgttttttcgtttttttttttgcgtattgtatatttatattatttttttttttcggttttatggaggaagtgagaaagttggtatagttacgtcgggtttcgtaggattaggttatttagtgatagatggataatgtaagaatgaatttttttttggaatattttatatttagtagtggcgattcggggatttgtttagttcgagtttatttttcggattataggattataattttttagtcgtgcgcggttagcgttaatagttgcggcggcgacgatcgttttttagtgggtaggggggtgtagatcggttcgt

SEQ ID NO: 11514 - DNA, 766 bp, Artificial Sequence
  Description of Artificial Sequence: Synthetic polynucleotide
cgatttcgttttatgtcggtcgtatcgtgttttttttaggttttattagtatttgggttgttatggtgagattaagatgggtttcgtttataattaacgatgttatttcgtagcgagttaaagttattttttattttgggttcgttacgcgatttttgtcggttttcgttttacgcggttttagtacggcgttaaggtttcgtttataaatcggtttcgttttttcgtgttcgggttcgtcgtttattagacgtcgtttcggcgtagcgagttgagggtacgtttatttttttttcgggtttttagtttttaaggttttagtataatgttttaggaggaagattttaggttttttttttattcgacgttgtttttgggcgagtcgaggtttcgtttattcgtcggttcggttttcgtttttatttgacgttgtttttgtgtagcgagtttaggttcgcgttcgtagtcgtgttattttcggagttcgtttttttgtttaggttttggaagcgttcgcgggtcgttaagttacgttgcgagttttgtttaggaacgtttagtcgttcgtcgaagtttagtattttcgcggcggcgttataggtgaatagtatcgggaagtagtcgtggttttgcgcggagggcgggggttattggagcgtcgcggaggggaaatcgaggtcggagggaaggttaggcgggcgtttggtcgttcgggaggtagatgttagtttaaggatatagacgggttatagcgagggaggttcga

SEQ ID NO: 11515 - DNA, 691 bp, Artificial Sequence
  Description of Artificial Sequence: Synthetic polynucleotide
cggcgattagttttcgtagaggcggggttcgagtttttagttagagttttaataagtagtcgaagaacgcgggtagaggtttcgatatggttaggagagtacgtcgtcgttcgtaggtgttcgggtttcgtcgagatcgggaagaggtggcgtcgttagttttttttagatttaggggtggttcgataggtttaatttcgtttttcgttttgttttttcgttttttttttcggcgacgttcggttcgcggttggtcggttcgtcgcgcgtttcgggacgagggcgggaggcgagcgcgttggtcgtcgcgtatttattattgttaacgtcgtcgtcgcgttttttttattttatttttttttttttaggagaatttttagtttcggtttttttcgtttcggcgtttcgttacgtgatttcgggtcgttttttatacgtgatcgtttttttttttttttttattttcgtattcgttttttttttagttttttgtttcgttttgttggtcgttaggtatttcggggagaggtcgtttggaggcggggttttaggttttatttttcggagggtggagaggggcgggtaaattacgtcgagtgggcggggtttgaatagaggcgggttcgcgggttttttttcgtcgttttttcggttatcggacgagcggtttcgtgttcggtttttttatcgt

SEQ ID NO: 11516 - DNA, 1024 bp, Artificial Sequence
  Description of Artificial Sequence: Synthetic polynucleotide
cgcgtatttattttgggttgtggagtttagttggtcgtcgttcgtttcggttacgcgttgcggttttacgggttcgggagcgagggtttcgttcgcgtcggatatgggtcgtttcgtcgagttcgcgtcgcgtcgttgtcgtttagttcgtcgttcggtagggcgtacggaggaagggttgtgaggtgttgggtgtagggaattgattgtttttggcggaaaaatatataaaattaaaaaaaaaaatgtttttagagaagagtatattatttttgcgggacgttttttttttttttattttttttttttaaattttatttcggggaagttttgatttgaaatttgcgaagaaaattgttatagcgtaagttgatagcggcggggttttaggggttcgaggtggatttagcggggaggggttggaaagagagatcgggtttgggagaatttcggggatggggattaaattttttttttttttcgttcggagattattatttattttcgtattttttcgtagtcgttttaagtttttttttttttttttttttttttttttgtttcggaaagttagcgagttttcggtagcggtcgtattttcgtttcggtggtttgacgacggcggcggtcgtttttgcgcgttttttcgttttttttcggtttagtttagacgtcgtagtggcggtaattgcggtagcggtggcggttttgatttcgcgtatttcgttttttttttttagttagtttattttagtcggtttttttgcgagggggttttttttttttttgtttttttttttttttttttatttttataattttgaaatatttttttttttgttgtttttttttattatattcggatcgggaaggtttcgaatttttggttagcggtttcgatgttgggagcggcgcgattcgggttcggtcgcgcgatttttcgcgttttgcgttgtttgggttaggaggttagagtcggtttgggttggttcgggttttttattcgggcgttgcgttttttcgg

SEQ ID NO: 11517 - DNA, 1339 bp, Artificial Sequence
  Description of Artificial Sequence: Synthetic polynucleotide
cgtcgcgggttttggcgagtaggtgattacggatttttggtgtttgttgggcgagacggtgaagtaatttttttttcgttttttttttcgtttagaaaggtgtaagattcgttaaatcgtgcgttgtatagcggcggtcggagtagacgcgggatggtcgcgcgttttttgtatagtatagaggggtagtcggagagtttgggaaaggtacgagcggggaattagagtatagggtgcggattagaaagagtagacggttagtcgggcggggaaggaagttgtcgagttgtaggtgtggaaggggttgttttaggtttatttttggtagacgagggggcggggagtcgcgtcggggacgaggagattgcggatcgggcgcgttttttgcgtagtcgttcgttcgcgtgtttaagtttttcgggaatggttttcgtttaggggtttagttcgtcgtcgttagtttcgtagagtttgtagttgttggggttcggtagtcgttagggggcgggagttgcgtcgcgaataatggtcgcgtttggtcgcgggttggcgggaggcggagtggaggtagagtcggtgtcgggcgcgcgcgtcggtcgggcgtgttggggcgcgggagcggttgcgtaggcgggggcgcgcggcgcgagcgcgggagggcgcggcgggagcgtcggggaggcgggcggaggcgggcggaggcggggggcggggagttcgaggggtggaagtcggcggcggtcgagcggggttagttttttgtagtgtttgttaatgttggagtcgtttgtaaagtgttttcggtaagaaggtaaatatttttatcgggggcgttcgggagatttcgattttcgcgtcgtcggcgaagaaggtagagggcgttggggagttttgtagtttcgtagtacggggaattcggagaaaagtagtttttttcgcggttttttttttttcgcgtttttttttttatatcgggttttcggggtagtagcggggaggggagatcggcgggggagggaggatagggaggcgaaggaattggggtggggggtgcgtgtgtggtggagggggtgggacgatataggtgttttgaggggaggagtcgggaggaaggcgaggaggtcgggttaagtgggggtgcggaggtcggggagataggaacgcggttgcgggcgcgggaggttggggttttagggggtcggggtggtagcggtcggaagagaggacggcgagtgtagttacggtgtggttgcgagggagagggagcgtttagagtagggtaggggagggcggttcggggagggtttgcgggaaatgggtttgggggcgttggaggcgg

SEQ ID NO: 11518 - DNA, 2273 bp, Artificial Sequence
  Description of Artificial Sequence: Synthetic polynucleotide
cggtttttagggatcgaggggttcgtagagtgatttattttattttcgggaagttgtcgggagtttcgcggattcgtcgcggtttttagtttttatgtgtaggggtttcggggttggggtttggttagtgcgacgtttcgttcgcggttatttatagttgttgaggaatagtagtatcgcgaagtcgagcgtggcggtggttagtaggattaggtaggcgttgtagggtattatgaagtttcgtattagtagggaggcgttaggcggttgtcgggtgtttcgcgttagcggtagcggaggtatggttcggggtttcggttttgcgttttatttttagagcgtgggggttttttacggggtgtttttgggtttttttagggttgttcgttttattttgggatttttggggcggcggatagtagttgtgtttttagagtttatttagttatagttttgggggtgttaggtttcggttttagttttttaggtttatcgtgggaggagggtagaattttttcggagtagaaattttaaatgtgggtttcgaggtaggcggaggagggattgggagttcgtagttatttttgttgtttatagttttttcgggttggtcgttagcgttcggttttttcggagttttcggagtcgcgtaggtcggagaggcggtgcgcgcggtaggtgcgcgggggtcgggcgtcgagggtttgttgttttcgttttcggtagaggcggaagcggcgataggagcgggtaggtaggaggggcggtcgcgtcgggagcgagaagaaagcgtcgtttgcggaggtcgcgtcgggtttcgggttttttttagtttttttcgttttcgcggggttggggaggtgagtgaggggcgaagacgtcgcggagggagggcgggagtagagataaaggaagtcgtttttagggatttcggcgttcgcggggagttttagaggatcgggcggatgcggacgggagagcgtcgtataaaagggaacgtcgggtaggcggggtcgggggtgtttggttggggttggggttggggttgggttcggggtcgggagcgttggggttggggttgggtcgggattggggttggggtggttgaggttggggtcgagggtgggtttgaaggtgttgggattgggggtgggattggggttgggtttgggggcgttgaggttgaagttggggtcgggggtgggattgggggcgttggggttgggtcgggggtgggattgaggttgcgggcgtttaattgggattgagtcgagggtagcggtggggttgggtcgggggagtaggggtcgcgtcgggtagcgtcgcgtgttggagcggaggcgggtgcggtcggggtaggtcgcgggaggaggaagcgtttggggagtaggagttgggtcgggcgggttcgcgtttcgtattcgcgggggtgaatcggagtcgtcgtagggggttcggggggtcgcgtgcgatcgcgtgtgcgcgtcgtcgtgcgtgtgttcgcgagtgtttgcgttcgcggtttcgttttggcggggcgtaggtgggggagggttttaggtgcggcgcgagttggagggtggagtgaggtgagcggtttagaaatcgtttcgtttatttttttttggggattgatagtggtttttttagtcgtcggcgttttcgattttcgcgcggggcggggttatgtaaatgagttttatgtaaattgcggcggggattttttgcgggttcgtggggttggaacgtttttaagaggtcgtttcgggaacgttcgggttttgacgttattgcggttcggggcggggaatgggggtttgggtttatttgggatttttgacgcgtagttcggcgtttttatattcgttttcgtaggtcgtttttttttttggtcgttgtttagtcgggggattcgggggtaagggaggggttcgttcggttcggtgtgtgtattattttttagagtttatgttaggttcgattattttggaggttagaatttttcggcgatcgtattttagcgttttcgtatatttttggttattcgtagtttttggaagggatttttgcgtatttattattttgtttttttttttgtttttgtaatgatcgattttattttttaagttttagttttaggaaagtaaggattcggcgttagggcgtttttgtttcgttagttttttttagtatcgcggattaagttatttgttatattcggttttatttattttgtagacgatagttgtcggtagttattagtgttatcgcgt

SEQ ID NO: 11519 - DNA, 5586 bp, Artificial Sequence
  Description of Artificial Sequence: Synthetic polynucleotide
cgggtttagtttcgtatacggattcgttaggagtaggtggttagtacgcgttgttggcggcgtattacgtaggtgtaggtgtttttattgacggcgttggcgatgatgtttaggtgcgtttcgtttagggttaggtagtcggggtaggagaattttaggggtttttggtttttgtattagttgtaggggggcggggcgttttttgtaggtatagtttttttcgttgtttgtttcgtatttttgttttaaggtcgttcgcgggttgtttatttcgaggatcgttcggggcgtttatttattatatttttttttttttgtggaggattttttggtcgtagcggaaggttacgtttttgttttcgggtattagtttggttttggttttggggggcggtggggtggtggttatcgtggggaaggggaattttgtttcgggtgggggaaagagtttcgttagtgtttttttagtttcgattatggttaaggtttagtttttacgtagttttgtttcggtttcgtgggtattatcgtagtagaagtcgtagttgttggggtagagtttttttatgagtcgtcggcgagcgtcgtagaagttttttcgcgtttaggacgcgtatacgaatagtttgtcgaggtattttgtcgggagcgtggggagtacggtttggtttaggatcgttcggttttcgttttttcgttcgataaagggatttatcgtagagtcggtgtagtttttatagttcgttttgggataacgttttttagtcgcgtagcgtggcgtttaggtgtatgagcgttcggtcgtgttgtgagtgtattaggtttagcgcgtggtcgatttcgtgggtcgttacgtgtattaggttcgtgagttatacgtttgcgggtttcgggggttagcgtttgggagtttcgggtttagtttcgtcgttcgtgggttagtttttcgaggttcggtgtatttgttggagcgtagtcgcggagtcgttttcggtcgtagttacggaaagataagaatgttttgggtttaggcggtgagttcggtttttaggaatgtagttttagttttcgttttagaggcgtagggggatgggaaagggagtttagggttgtcgggatgggggtttttacgggtttttttttttgtttgttagattttagtggtagttattatttcggaaggttttttttgtcgtttgttttaaagttcgatcgcggtagtttattgtgttgtagaggagaggtttttaggaggttagtttggacggttattttttttttagttgtagcgcgtggggtttaggatttagtattcgttgtcgtcgaagtggatgtcgtcgtgcggggggaagaaggcgtgggttagttttttcgtggggtcgtcgaagtagtggtgtagcgcggagattaggtagttcgtgtggttgatcgggtagaagtttggggggagtacggggttgagaggtcgggcgcgtagggtcgggtcggggcgggggcgggcgtttatttattcggaggtcgttgggttgttcgggggttatttcgcggaagttgaagggggatacgtcgttttatatgcggaaggcggtagttagggttcgtcgcgtttttcgcgggtttagtaggtttcgcgggaaggagaggattttgtagggagagtgagtttagcgggcgtcggtcgcgttttttttttcggggtttagttagggcgtatttgtaggtgaggttgaagtggttttagcgtagtttggttggagttagcgtgtagcggcgtttgcggggggttagtgggttcgggattcgggtgggggggatcgtcgagaggtttagcgtagcgacgtttttttttagggaagaaagcgtgcgtgggaggtatcggtgacggtttttaggattaaaaattgtcgcggaaaatggattggaaggaaacgggggtgggggtgtttagggttgggagcgggcgtggcgggttttgtttgtttgtggtttcgggttttttaatttgagcgttttgttgtacgtttttgggaacgcggtttagtggaggggaaggggttgaatagtagggcgaggttttttattttttttaataattggatataggggcgtttaatttttcgatttcgggacgtatattcggatttttaaatatttcgtatatttcgtatacgttttgcgggtttttcgatagattagatttatagacgtgaggatttttttaattcggtatttggtttttttttcgtcgtttatttgcgttgcgttttaggtcggtatcgtcggggtttttagtcgggttagtagtattagcgcggggaggaggtatagggcgattagcgcggttttaagttagcggcgttcgacgtttgttttcggggttttcgaggggatacgggtttcgcggtttatggtagatttgttgtggggtttagggttgtatggggtagtaaggcgcgggggttcgggtcgtagagttttcggggaggattcggaggggaggtagtggttcggcggttcgggttatagttcggtgtggtgggggggagggagacggggcgggagagggggtaaggttgtttttgaagggaattagttggttcgttcgttggtcgagttgtttgttgtttttagtcgggggtatggggattcgcgtttcgtgggttaggggtagaggtttgggtatggtttgttgggcggggttttcggaggggggagcgaagagggttttaggtagttcgggaagggtagcgttagggttttcgtttaggaaagggtagtagtgggggtttttaagtttttattgttgggtagtgagtgatttggtggttttttttttaaatggaatttttaaaaaatttttgagttttatatgagcggagtttttattttggtttaggtagttgagttgggtcgtaggagacgcgtcgttcgtttgatagtgttttcgagagttgggaggggatggtcggatggggacgtggtagtgagtatggggcggtggagggggaggcggggagggggtgcgtgggtaggtaagggtcgcggagggtgttaggttgcggggcggagggagggaatttgttagggtttttcggggagtcgggaaggggcgggttttggttgcgggaagtttcgtggagggtagcgcgtgaggtggagggtgtgtggtttttaaattttcggttaggttttagtaaaggggagagggagacgggagggacgggaaacggagttaagcgtcgggtttggaggtttggatcggttttgattgggggcgggggcggggagttcggagatttaaaggttcgacggggcggtcggcgtttaggcgcgagcggttttgggttgggatcgagatcgggtatcggcgtttcgcggggcgggggtgggggattgggtagaggagtaggagatttcgagttagatcggtttgtgtttgtttcgttttttttcgtttttcgcgtcggcgtcgggtttagggtgacggtagttcggttaacggggttagcgttaagtagttggcggcggtcgcgggcggtttttggaaagcgcgagaggttgggtttggtcgtcgtatttgtttcgatatcgtttttcgtttttttagttcgttatttcgtttgcgtgcgttcggtttttagattttgtttgggacgttttttaattaattttttgttgggacgggattttatagttttggggagtgtcgggttttttggattagagcgcgagttttcgcggtcgtttttaggacggaagagcgaggggggttcgggggtagatataggagttttcgtttcgtcggattcgggtttggggggcgggaggcggtcgtgttcgcgtttgaagggtgttttggttcgaaggtcgtagttcgggcgggagtttggattcgagagtttggggcgggcggggcggatttagggaagggtttttttttttcgtttttaggttcgttcgcgtgtttcgaggggaggattttagaggcgttcggttttttaggtagatagtagaggtaacgttcgagaatttttttttttataaaatatagggcgggggtacgcgaaggtagttcgggcgcggcggacggcgcggtttatacgaagatttggatgcggtcgcggatgggttggcggtagatggggtaggcgttgagcgcggagtcgtagggggcgtatgcgtcgtggtcgtattggaatacgaggcggatgtggttgtcgatgtagatggggtaggtgatgcgtttttttatttgtcggtagcggttttgtagtttttttattagttggcgcggcgggtcgggggcgggggcggcgttcgttattttagagtcgtttgcggggtgggggacgggtgtgagttgggaggtcgggtgggggaatgcggggagtagggagttgcgggggggcgaggttgggggcggggtgttatttgggacgggttgtgatttgtaaggggggttggcggggtgggtgatttggaggtagaggtggggttcgggtgcgggtaggaggtgagtcgtggaaattaggtataaggtggtgtgcgggttggagttagggttgtaggtgggttgtgagttgggtcggggtgtgatgggggggcggtgttttgggtgggttgtgatttggggtggggttatggagggagtgtgatttgggaggggtcgtgaaatttagcggggttggggtgtgatgggggaggagggtgttattttgaggcggggttgtgggtcgggtgtgatttggagtaggtggggttgggggttgggggttggggggtcgggtgtgagttttgggagggcggggtgtaatttggggaagggttatgggcggaagtgtgggagggaaggggtgggggacggggattcgcgggttattagttgagtaggaggcgtgttgggggcgtagagttttatttatttgggcgtagttttttgttgacgattatttggtatttgatgtatttttttattttgcgcgcgtattttgcgaagaggagagcgcggttggttgcggttttattagtcgggtttttttatttcggggttttttatttatttttatatacggtgcggtgttggtacggcgagaatagtattagtagcgttagttcggagtatattaggtatttagcggtttcgggtttcggcgcggcgtttacgtgtaggttcgttacggtgttgggggtttcgagcgtttgtttggggttcggggtcgcgttttcgttcgtttgtcgttttttgtagggggaggaggcggtttgagaggggttcggaggtcgtcggattttattttcgtcgtttacggatttatcggaagcgttgggcgtagttttgaagggttttgagtacgcgattttcggcggttaggtttagcgggtttcgatcgcggtggttggtgtagtttacgtcggcgttttttagcgttaggaagtaggcgatcgtcgcgtttatcgttagtttcgcgttgtcggggaggttcgaggtttgtagttgggcggtaggatagacgtcggtgagggcgggcgtcggggtaggttcgagggaggcgttttttggtatttggtagttttagtagtcggcgt

SEQ ID NO: 11520 - DNA, 1264 bp, Artificial Sequence
  Description of Artificial Sequence: Synthetic polynucleotide
cgcgggtgaatcgagcgttttttcgtttttttggtttgtagttagagatagtttttcgtcgttcgatttcgtattcgttgaggagcgtagggttgtgttcgtatttcgtttcgtatttgtttgtttagggaaatcgggagtttcgcgggtttcgtcgcgggaaggaggcggtattgggttttaaaaattcgtgttgaggagaagtcgagcgttttaatatattcgtcgtcggtcgggtcgggttttcgcgcgtttcgacgtcgttttagtttcgttcgcgcgcgttcgatacgttcgttttcgttttcgttttgatatagatatacgcgcgcgttttcgtattattttagaagtttattcggttcgcgcgcgtatttagatacgcgtggtttatattcgtcgtatacgtttttcgtataaatacgcgcgttttttacgttttcggttattttagatatacggtttcgggttttacgtaggttcgggcgtcgatatattttcgcggtatggatacgcgtgttttttatttatttttcggttaaacgtatttttttttgtagttttttatttttgttttttatatttattttttattttcgttttagaaatacgttttttatatcgggttcgtcggatttttatattttttattcgcgttagaaacgcgcgtattttcgtggtttttttttgtcgcgcgtaaatacgttcggttcgcgtacgttttttcggtttggtttcgtatattcgcgttagaaatacgcgtggtcgcgtattacgttttcggttcgcgagtacgcgtgtttttacgtttcggtttcgttttcgtttcgcgcgcgttttcgttggtcgtcgttttcgatcgtacgcgtttttcgtttagtttcgcgtcgtcgcgtatttattcggatttgttgagttcggtttttgttcgttaggtttgcgtcgagtcgtcgtttattggttttcgcgtttcgttcggtttcgttcggttcggtttagttcggtttcgcgttcgtttagttttattcgtcgtagttggaacgattcgcggggtttcgggtatcgcggttttttcgttattgttcgagtgcgtcgttcggattaatggcggggcgcggcggtgagtttatcggattagatttcgttttttaggtcgcgtggtttaatcggaggatgcgacgttattcggagtcgggtagaggttggtgcggggcgcggagtcgttcggcgcggggattgcgtcggaattgcgttcgagtcgcgt

SEQ ID NO: 11521 - DNA, 716 bp, Artificial Sequence
  Description of Artificial Sequence: Synthetic polynucleotide
cgacgggcgcgtgaggtttagagaggagtagtttcgggattcgtttttttttttgtttgattttggttaggaaaaggggtttggagcgttttcgggtttcggaaacgcgggatttttcgtaggtagtcgagtagggcggtcgtcggggttatcgttgggcgtcgtcggagttttaattcgatttatgtgcgggatttcggttttttgtgcgggagttttcgttttgcgcgtcgggttttcggttttcgttttcgggttgggattcggtttttcgtcggttttattgagttttcgtttcggatttgtcgatttttcgatttcggggagagagattaagagattgggacgtaaagggcgtgaggatcgtattttttattcgtaggtttttttaggggcgtcgcgtcgggggtttcggttggcgatcgagtaggtttcggtcgagtattgtcggcgttgttatttgtgtgtatcggggatagggacggagggacgcgatttttatttattcggttcgtttatttgggtcgttcgcgtttcggcggtttcgattcgacgttcgagttagcggagttcggagtcgttgggtttttcgtttttttcgttcgttcgtttttttcgttttttcggtttttttcgtttcgtcgttttgcgtcgttttattataaaaggtgaggttcggggggagggggcgcgggattttcgtttcgcggaagcgg

SEQ ID NO: 11522 - DNA, 619 bp, Artificial Sequence
  Description of Artificial Sequence: Synthetic polynucleotide
cggtggatcgtttgggcgggtaaacgtttttttacgttggcgggtaggatttgaattcgggtttttagggttttgtaggtcgttattgttttcgttttttttttgttttcggtttttttcgtttggtttgtcgcggttcgtcgttttttttttttttttttttttcgttcgttttttgttttttgtttttttttttcgtttttttttattttttgtttttcgcgatttttttttttttttcgatttttcggcgtcgttttttttttttttttgttttcgtagtttaaatacgcgatatttggagtaatagtagtcgttcggcggtttgggttttattataggtcggtttttatcgcggcgtgtattatattattttattttaaagaattcgtagagaaattcgtttcggtcgataatagaaagtaaaaatatagttgatttttattagggtttttttataggtttcgcgtgaggtaatgaaatatggaagcggtgagatatgtaatgttttattaagcggttttagttataacggcgtgtatgttaattacgtttgtaggttatcgttcgttttcggttgtcggattatttagcgcgttttttttcgagtttcggacgg

SEQ ID NO: 11523 - DNA, 293 bp, Artificial Sequence
  Description of Artificial Sequence: Synthetic polynucleotide
cgttttacggggtaaatttcgaggtttagtttcgcgtgggagtcgtagcggggcgggttcgttttgggttgggcgggtttttttagcgtagcgttgggggttgcgggttttttagtagtcggagtagtattttgagtttcggttgttggagcgttgggatttttggttgtcgttttcgtagtagtagtaattattatttcgttgtcggcggcgtttttttgggaagtagtagtaattggtggagttggagtcgtagtagtttgagtcgtcgtagtagtttttgtcggagtcgt

SEQ ID NO: 11524 - DNA, 2748 bp, Artificial Sequence
  Description of Artificial Sequence: Synthetic polynucleotide
cgaatcggtttttttcggtttcgtattttttagggtcgttcggcgagtttttgtatgttttttattcgttaagttcgttattcggtttcgtttttttatacgcgtattggtacgtttttttttagtttttagcgggcgggtagtttgtcgggtatttaggaagttcgggtttttcggcgtcggaggatttataatttagttatcgtaataagttcgcgtagttaaagtagttcgtttgggtattaggttttatcgtttttgtttcgtggttttaagagggttcgtgttagttttcgaggtatggtcgtttggcgttcggtatattttagatttatttttttttgagggtaggggtttttcggggagagaaagagtagtttcggggttcgtttcgggtttttttgtatagattttttaggtacggagaataatggaatagttttgcgcgttttttttattcgagtaagttttgttttttttttttcgtttgttcggtttttattagttatagggtaaaggtttttcggttaaataggagtttcggcgttaacgtttagagttttcgatacgttttaaaagatttgcgggtgtaggggttggggttagagtcggggttgaggtatcggatatgcgtttagatgcgtatagttggtagttcgttcgttttcggttttagacgttttttttagttagaatttttatatcgcggggaaattcgatttgcgtttttattcgggatttatagaggaagtggagttttagttgtgtttcggggttaattagtttttatatttgtttttttatatttgttttttagattcgggttttcgttggacgttttttttgtaatgcgggatgtttttgttaagcgtaggttatattataacggaggtttttattagttttaggttttgttatattgggattttggttttatttttgagagtttgtaatttttttattttttattttattgtttagttttatttcgggtaggttagagtcgagttcgggttttcgtttgtaatgtttttaagaaggtatatttgagttatgcgtatttggaggtgggttagtttagtatatttgggcgtaatgtttattatagtttgatcgtgaataggagggtttttcgggaaggcgtaaggggagggggtttcgttttttttatattttttttagtagttggttaggagaaagttaggggcggggcggggcggggcggtaggatttatttagtatttggttgaagagtagttgttttaggttttttagtacggttattattagttcggggtttattttgaggaaggcgcgttttttttggtttttggtagaggggataggtttagagtttttttgcgttttggttttgttggagagtagttcgtcgttcgatttgttattttcgtttacggtcgttttaggcgttttgttgagcggtttgattttcgtatagggttttcgagggattcggttcggtttttttaggttgggcgcgagcggagttaggggggttttggcgtcgttcgtcgggttgtttttggtttggaagagcgagtgtttcgatttggatagcgttttggatattagcggagttttacggtttttggattttattttgtttaagtttttgggcgttttggttatatcgtcgttttattcgggtttataaagttgtagttttttttcggagttcgtgagaaaagagaggttggtgagtgatttttgtttgcgtaggttggaggcgggcggttcgtcggggatacggttgtttacgttgtcggatttgaagatttttagtttagtcgcgttggttttggttatgtcgtcgtcgtcgtcgggcgttttggcgcgtttgggtagtatgtttttgtcgttcgtcgttgtcgtttttttgtcggcgtttcgcggttcgttcgcgttttcgtcgtcgtcgtcgttgtttagttttatttcgggttgtacgtttttgacgttgttgtttagtattttgttcgcgaggagcgtatggacgattcgcgcgtttgtaggtacggggggagggggtagggggcgggagcgtaggaggaggaggcgggggaggaggagggggagagagaggacggaagaaatcgaggaagaaggggagagaagggggagagagcgagggaggagggagagaggtaagtcgagggcgtaggggaaagaaacgcgaggaaggaagtcgggaaaaaggaaagagtagggaagtcggggagcgatagggcggggtcggaggaaaaggggcggggcggcggggaaaatataaattaaaatttaaaaattagttaaaggaaggatggaagtttcgcggttttttcggcgtttagcggtgtttttgttttggtgttcggattttagttcgcggtttgtttgtttgttagtttcgtggatatcgtattgtcgggtagcgtttcggtcgtatttagttagttagttagttcgagtcgaggttgtaggttgtagtttcgagtagaggaaggagggaaggggaaggcggggagtaaataggaggaggggagcgagtgtgcgtacggggagggaggtgggggagagatagtgtgtttatttttggttcgggagggggaggtatttgcgagcggagttttaggggcggatgagtggggggtagggggaaataaaggaaaagtagttttttttttagtttttcgcgtagaagcggggcgggtttttggattttcggagggtacggggattttttgtcgt

SEQ ID NO: 11525 - DNA, 433 bp, Artificial Sequence
  Description of Artificial Sequence: Synthetic polynucleotide
cgggattgggcgttagttagtagttcgtaggattaggcggggataggcgggtagtatttataggtaagtcgttagggggtttaggtttttcggaacggcggatagttcgagtttagagtagtcggtagatagtatgatgtcgtttttttggtagtggtagggggtcgggtaggcggtgggtttcgggtcgggttggggggcgtcgtcggtttttcgggaagcgtatagcgcggcgtaaagttatagcgttcggagtttcggcgggttgggtatttcggcggtcgggttattggggtatttggcggtcgggcgcggacgtacggcgcgatggtcgtagttgttttttttcggtttcggcgggttgtatcgtcggtggggatcgttttaggggttttattgggcggcggcggcggcggtgggagcgtcgggacgg

SEQ ID NO: 11526 - DNA, 1376 bp, Artificial Sequence
  Description of Artificial Sequence: Synthetic polynucleotide
cgcgggatttttatttttgcgaggtttttagagtttttttgggaggaggttttcgttggaacgtgtttgggtgaggagagggagatcggtttttaggtagggacggttagggtgcgcgtattttagtttttgggttatttcggcgggagtttgcgttttttttaggcgcgatttttaggaaggtttcgggtggtgatcgtagattggagagtgagttgggttggggaaagagtgaggcggatcgtttttaattttcggtaaagtgtgcgttttcgttttattatttaggggcggcggtttttgatgagtttatgggggcggggcgttaggagtttcgttcgcgagtttttttttcgttttcgcgaagtagtagttcggaattcgcggttagggattcgcgtaggtttttttttagttgaggggcggtcgggtattcgggtttcgattcgcgattatcgtatttattattattatagcgggaattgttcggcggtttttagaagtttcggttcggtcgtagaggtgggttttcgagtatagaggtttcgaaattcggttcgtagtttttagttttaatgtcggggggcgcggtggtttcgggcgattttttatttcgtttttggagtttataggtggttttataatttcgcggttcgcgttgcgttcgcggggtttagtacgttgtcgcgggatttgtttaacgtggagtgtgtgtttgttttttttcgtttcggttttcggcgtagtttttatttagaagacgaaattgaagacgaagagtaggtatttgatgtatttggtgtagttttttatttttatggcggcgcgggcggcgggcggtttgcggggcgcgggtcggttttgggcggcgggcgggtcggcgcggggtttggcgggtggtcggtaagggggtttggcgggtcgaggggcgggggcgcgaagaaaggggcgcgggggcgcgggggcgcgggggcgcgtggggcgttgggcgtcggaggtttggtaggatgcgcggtggggtcgtcgtcgtcgtcgtcgttgcgcgttcgttttttggtcgggcgcgcgtttcgtttcgtagtatttatagggcgtcgcggtttcgtttttttataggtttcgtttcggttagtttacgtttcgttttcggtttcgttttttgtcgttagggcgcgtagtcgaggggtatggggtcgttgtatttatttttaatttggcgcgtttcggttaggattttagggtttaggtgtatcgtgttgggcgcgggaggcgtttttaagttgttgtcgcgtttcgagtttttaagggggtggtagtagggtcgcgtttgaggataggtatgtagcgtttgtttaggagtgtagtttcggtgtcgg

SEQ ID NO: 11527 - DNA, 3393 bp, Artificial Sequence
  Description of Artificial Sequence: Synthetic polynucleotide
cgtagcggaggcgggaggagagtttttggcgggtatttgtttttcgcgtttttcgcgcgtttaaggttgggtttcggggtattttattcgggtcgtttcgggtttagttttagtttagaatgattttatattttttatatttttaagttttagaaattatcgttttgagaattttaaggaggatattttttttcgggttttttgtagcgtcgagtttcggtaggttttttcggcgttcgtttgttgcgagatttttttgtcgtttcgaggagtacgagattttagtcgtttgtagattatttatatttgcggagggtggtagtaggggtttggttggtttgaaacgcgtcggggaggcgcgcgttgtattaaatttcgtttttgtttttaagggtagattcggggtaaggggattaagattttcgacgtatttagcgttatggggatagttatggttaatattttgtttttgcggttaattttaaggttattaaaattttttattcgtagagagcgcgtatagtagtgcggatattcggggattgttttaaggaaggttgagttttgggagcgcgtggatttcgttttatcgttcggcgattggttcgcggggttgggggcggagatcgagttcgcgttgtataaatatttatgagtcggtagcgcggcgcgagcggggttggagtcgggaagttgggttaagggcgttgttttcgtcgaggaggaggcggcggttgggcgcgggtcgcgttatttaggtgttcgtttcgtttttcggtttggatttgtttttgggtgtttagtaggaaggagattgtgtgtatttcgttcgattgcggtcggagcgcggcgttgatttttttaggcggcgggggttcgtttgtttcggcggcggacggacgaaggacggacgtcggagaaagagggcggcggtttgggtcgaggcgggtttttaatttcggcggcggcggcggcggtttggttttgggggcgggtatgagttttcgggggtcgagtggtggtcgttagggttgattcggcgcggtaagcggttcggtttagttattttgattgcgtatcgcggttttagaggaaatttgcggcgttttcgttttttttgttcggcggagttatcgtcgttcggcgcggcggggagaagtggtcgggcgcgcggagaggaggcgagcgagcgcgggacgatgagtcgaggttcggtcgttttgcgtcgcgagggttgagcgcgattcggggttagtagagcggatttacggattgtggcgcgcgtttgtagtcgtttttaaattttcggagcggcggaaaggagtgcggaagggttttgtttaggttgcgggtcgcgtcgttgcggacgcgtttttagaaggggttagattatcggtagatttttttttcgggcgaagtataagggagattttagattattcgttgtattcgtttgcggttttttcgtgggtttttttttcggtatttttttgcgcgtcgtttggagggcgagggtatcgggtcgaggcgtatagtatggagtggggttatttgttggaagtgatttcgttgttggtcgttttggcgttgttgtagcgttttagcggcgttgcggtcgtttcggttaaggagttggtatgttaagagattatcgtgtcgttgtgtaagggtatcggttataattatatttatatgtttaattagtttaattacgatacgtaagacgaggcgggtttggaggtgtattagttttggtcgttggtggagatttagtgttcgttcgattttaagttttttttgtgtagtatgtatacgtttatttgtttagaggattataagaagtcgttgtcgttttgtcgttcggtgtgcgagcgcgttaaggtcggttgcgcgtcgtttatgcgttagtacggtttcgtttggttcgatcgtatgcgttgcgatcggttgttcgagtaaggtaattttgatacgttgtgtatggattataatcgtatcgatttaattatcgtcgcgtttagttcgtcgcgtcgtttgtcgtcgtcgtcgttcggcgagtagtcgttttcgggtagcggttacggtcgttcgtcgggggttaggttttcgtattgcggcggcggtaggggcggtggcggcggggacgcggcggcgtttttagttcgcggcggcggcggtggcgggaaggcgcggttttttggcggcggcgcggttttttgcgagttcgggtgttagtgtcgcgcgtttatggtgagcgtgtttagcgagcgttattcgttttataatcgcgttaagataggttagatcgttaattgcgcgttgttttgttataattttttttttagttaggacgagcgcgtttttatcgttttttggatcggtttgtggtcggtgttttgtttcgtgtttattttcgttatcgtttttattttttttatcgatatggagcgttttaagtattcggagcggtttattatttttttttcggtttgttattttttcgtgtcggtgggttatttagtgcgtttggtggcgggttacgagaaggtggcgtgtagcggtggcgcgtcgggcgcggggggcgttgggggcgcgggcggcgcggcggcgggcgcgggcgcggcgggcgcgggcgcgggcggttcgggcgggcgcggcgagtacgaggagttgggcgcggtggagtagtacgtgcgttacgagattatcggtttcgcgttgtgtatcgtggtttttttgttggtttattttttcggtatggttagttttatttggtgggtgattttgtcgtttatatggtttttggcggtcggtatgaagtggggtaacgaagttatcgtcggttattcgtagtatttttatttggtcgcgtggtttgtgtttagcgttaagtttatcgcggtgttggcgtttagttcggtggacggcgattcggtggcgggtatttgttacgtgggtaattagagtttggataatttgcgcggtttcgtgttggcgtcgttggttatttatttttttatcggtattatgtttttgttggtcggtttcgtgtttttttttcgtattcgttcggttattaagtaataggacggttttattaagacgtataagttggagaagttgatgattcgtttgggtttgtttatcgtgttttatatcgtgttcgtcgcggtggtggtcgtttgttttttttacgagtagtataatcgttcgcgttgggaggttacgtataattgttcgtgtttgcgggatttgtagttcgattaggtacgtaggttcgattacgtcgtttttatgtttaagtattttatgtgtttagtggtgggtattatttcgggcgtgtgggtttggttcggtaagacgttggagttttggcgttttttgtgtattcgt

SEQ ID NO: 11528 - DNA, 1381 bp, Artificial Sequence
  Description of Artificial Sequence: Synthetic polynucleotide
cgttttaacgtgttgttttggtattaggacgcgtatggggaggtggagataaacggtgcgtggggttcgcgtgggcgcgaggaggggtcgttacggtttttttgagagtgcgttgttgagttcggttttggaggcgtgcggcggggaggggttagttttcgggtgttttgtgcggttcggttggggttaaagttcggggcgggtttgtttttgtgtacgtgggagatggttaggggtgttggggatttcgagggttggtgtgaggtttcgggagttatcggggtgattggtcgtcgttcgtagacgggaagttttacgacgtttacgttttttatagcgattgtttcgaggatcgtaagttcgtgaattttattttaaagtcgtagttggagcggcgtcggggttataagttttttttggacgatcgcgattttttgtcgcgcgttggtatttcgggttttatttcgtgtttcgtttattcggagggttcgtttcgtttcgttttatgtttcgttttattcggggttttatttttattatcgagtttcgtttttattttcgtttattcgaggtttcgttttaaaaattcgtttatttcgtaggtttcgttttttttttagagttttgcgttcggtatcgtttttgagttttcggtttcgttttttttcgttttcgtttttgcgtcgtcgacgttcgttttttcgtagagtttttcgtcgattttttggtgaatttgagtcgttgtcgacgttttatcgtggtgttttcggacgtttttttgagtcgggtttggtgtagttatagttttcggtgggtttcgcgcggggttgggtgggttttagcgtagtatttatttttttgacggtttcgtttcgtagggagggtttgtgtcggttgttggagtttattcgtagatttatttttattattttcgagggttagaggcgcgatttcgcgtattcggcgtttcgtttgttgcgttagtatcgttatttggtgattttgttgttttggaggttcggtttcgtggtgcggagtaggcgcgggagggttcggggttagcggcgggttagagatgggcggtgttcgggttttaggttgggattttttcgtggggagttttgcggtattacgttttgtgaatgggttttggggggaggtttcgttgtttggggtttcgatgcggggagtcgtttttgaggttttcggagttacggaatagttgtcgtagggcgtggaattcgtgggtagtcgtaggtgtgtttttgggggttaggacgttaggggttttcgaggtgtttatatttgtaaatcgtttcgatttggtttttagattttttttttcgatttttggaaagaagtgtagttggcgttgtcgcgg

SEQ ID NO: 11529 - DNA, 493 bp, Artificial Sequence
  Description of Artificial Sequence: Synthetic polynucleotide
cgagttgtttttgggcgcgtttggggttgtatttgggttacgtgggcgtcgttgtgtagtcggtatttttcggttaatttcgcggtttggagaaggggttttgtattcgtcgtcgttgtttgttttcgcgcggttttcgtttattgttttgcggttgttttgcgggttgaaaagtttttttcggtgtagaatttcgggtttagcgatagtttgcgtcgagtgtgcgtatttgtcggagattcgttagttcgtcggtcgcggtgagtggtttttggagttattggtttagggcgggttcgcgggatggggcgggcggttcggggcgtagtcggttaggtcgttgttatggtaacgcggtggaaaaacgggtttttgggtatttcgttgtcggtcggttggtaattttttagcggagggatcgggtcgagttcgcggattttttcgagtgttttttggggtttagtcgttggtattttatttttttcgggttcgg

SEQ ID NO: 11530 - DNA, 922 bp, Artificial Sequence
  Description of Artificial Sequence: Synthetic polynucleotide
cgtgttttttttcgttatttggtacggttcgtgttttcgtcgttgatttggtaggttgcgcgcgtatatttcggtcgggtgcgggtcggcggggtatagcggtttttacggttcgttttcgttagttatttttcggttttttttttcgttgttcgcgtgtttcgggtcggtttagtatttttcgagttacgtgttcgcgtttttcggcggggaggagcgtagtcgcgggggcgcgtttcggtgatttcgttttttagttttttttttttgagttcgggagttcggttcgcgcggttaggtgcgaggagattcgggattttacgttcgttcgttttgtttagcgttttagtttcggcgtgcgaggcgtcgtttttttttttgttttgcgcggtgtatggaggggttcgttcggatcgtagtcgtcgttatcgtagtcgtcgtcgcgcgcgcgcggggggatgatttgggggtggtttttcgagtcggttgtagcgtaggaggtttggaggtttagttagtttcgcggagaggtgcgggggtgggggtttcgtcgtagggtcggagggaggggtggcgcgcgggtattgggtttggggggttttggtttaggggacgggaggtttcggggacgggcgggtcggcgttttttggagggcgtgggggtgtagggttgcgtgcggggtttggatgttgatgtttgttcggcggggagtttcggcgtttcgcgttttcgggggttcggaggtatttcgcgggaggaggcggggtgaggtgttagtgatacgacgaaatttttttttgacgatggttttcgggggtaggtgagatgtcgtagagcggggagttagggcgttcgcgcgtttttttaagggagtcgggtttttggttttttttaatttttatttttgtagagcgttcgcga

SEQ ID NO: 11531 - DNA, 719 bp, Artificial Sequence
  Description of Artificial Sequence: Synthetic polynucleotide
cgttcgaggatgttggaggtgggggtcgtcgttttagttcgggcgtagggttgggggattgggggcggaaatttttcgtagaattgtttcgtttgtttattttaagggaacggagaggattcggtttttcgcgaaaatttggtttagggaaagggatttcggaaagtagtttcgtagggttgtggtagttttatttcgattcgcgttgcgtttacgtgtagggttcgatttttttcgggaggcgcggcgtcggttggggttaggcggtcgaggatttcgcggtttttcgtttcgtttcgtttcgtgggttttcgcgtatcgtcgtcgcgtatttatttttacgggtggagcggggcggggtagtacggtttcgcgcgtagtttcgattcgttaggcgtatcgatcggcggcgtagcgttggcgcgacggttcgattcggtcgggtttttgtttcgggcgcgggttcggtttgggagcgggcgagttcgtttgtaggggaggcggggattcgggttcgggttgggggcggggaaggggttggatacgtttgcgtatacggcggttcgatttttaggagttttcgggaggggtagaaagggcggggtggaggagggggaagggcgggggtgatgtcgcgcggtcgtaggtttgggatggtgttcgcgttttcgagattcggatagaggtaagtaggggcgtcgtgggtgttagagaggcgg

SEQ ID NO: 11532 - DNA, 958 bp, Artificial Sequence
  Description of Artificial Sequence: Synthetic polynucleotide
cggtgtacggggttatatagtcggaaatttttgtcggtttcgggttattttttttttgaaacggtttttttcggagttattttttggaggattttatttcgttcggtgttcgggtttcgtatttattttttttttttcggttcgtttttcgtacggcgtttattttgtttttcgttttttcgttttatcgtcgttttgtttatattgtttttcgtgggcgttttcggtcgtttttttttttcgggtttcggtttgggggtgtttagttcgttcggcgtcggtttaaggtcgcgcgatttcgtacgttttcgagattcgtttcgtcgttcgtcgttcgggtcgtatttatcgcgttcgtaggatttgggggttttcgttttgttcgcgtttcggtatcgtcgtcgtcgtcgtcgttagcggaaatagggggcggggtttgttcgggaatggcgagtttgcggggcggggcggttcgggggcggagcggggaggggcggggcggagcggggaggggcggggcggagaaggatcgtagggttgagcggggcgttagcgttagtgttcggtattgtttcgggttgggttttttgcgttagaggaaggggagttcggggacggggtacggggttcgcgaggtacgggtgttttttcggggtttcggaagttttttttttcgtttcgtcgttcgtatgttcggatcggtcgttttttcgaggtgttatgatttcgttttttttttgcggcgaacgggttttttttcggggtaggggcggggaggttcgggtttggtagtgcgtttttttgggttttgcgtttatacggtatttaagggtttttttggtttaggtttcggttttttttttcgcgttaggttgtttggtttcgttattttatttttatatttacgaattttttttttggtgtttcgggcggattgtgcgagatgttgatagcgcgg

SEQ ID NO: 11533 - DNA, 3843 bp, Artificial Sequence
  Description of Artificial Sequence: Synthetic polynucleotide
cgcgcgtggttttcggagaggcgtttattatttgcgtggcgttttttcgcgtcggagtgcggttttgtttttagcgttagtgcgtcgcgcggttcgtcggtttcgtaggattggttatcgttttttatttatgtaatttgcgtgtgcgtgtgcgtgtgtgtgtgtgtttttttttcgttcgttttttttttttgtgtgtaagagagcgagggtgggggacggaggtaggtaggcgagtaggtagggaggggaagaagagaagggaagttattaaatatatatatatatatatatatttatatacgcgcgcgtatatattcgttttaattttttagaagtttcgggattgtagttgttttatgtggggtagtagtgttggtagggacgtcggtcgggagcggtcgggagcgggagtcggtcgtgcgcgcgcggttggaggttcgttggggtttcgtttttcgcgggagttattgttggtttcgttggagttgagcgtagagttcggatttgtttttttttgggcgtttcgttacggttcgcggagtagaggagtcgcgtcgtcgagagagagaggagttatcggcgcggcgttttgtttttttgtcgtcgttttcgtcgttttttcggcggtagtagtttgtagttacggtaaggcggcgtgattcgttttacggaaaagcgttttggggatcgcggcgacgtttcgttagttttatcgttttttgtattgttggttcgggtagggttcgggtagtttacgcggttgtcgagggtttcgggagatgtttgtttgtttttttggtttaggaggagggaggttagggcgcgggtggtcgaagaggtaagttgttttggagtttggagtcgtcgtagttttcggagttcgtcgcggattggagtttgggagtaagggttgggggagggtagggaggtgggaagcgggtgggagggaggcggcgcgttttaggttcgtttgtttttttcggatttcgtttttcgtttcggttcggtcgtttgtagtttttttgtagattagttcgttttaggttttcgtcgggcgttggaggagttcgcgaggcggcgtcgggttttagcggttgtagtttgttttgcggggtaagtgtcggttgtagtagtttcgtacgggcggtggttggagtttagattttggagatgcgattttagtttttcgttttttgtaattcgcggggcgttcgtttttttttatcgggcgttcggtcgcggtattgatgttcgtttaggagttaattgaggttgtagtcgttagatggacgtttggagggttttcgggtgtgagtgtgattgtatgattatttttatttttagtttcgggaaatgtgttttgggttgaaatgtgattatcgagttttttagttattttaattgttatttttaaatgcggtcgttatattggaggagtagattggaaggtagtggggcggtgtgtgtgtgtgtgtgtgtgtgtgtgtgtggatatatatacgtaatcgaggaatatataattaattatttgggtgaagggcggggggtttatttagtgagttttttttggcgggggggtcgggcgagttagttgttcgttgttcgttttttttttgtttgttttcgtttaggcgaggttggaaagtattggaaatttagttgcgtggtttttaattttggaaattggtttcgtttttagggtaaaatgttaaggcgatttatgtattcgcgtttatgtggatgagtgtattattgtttagttgggtgtagagtttttaatagtatcgcgttaagtttttattcgatttttaatttttttttattttttaatcgtggagagagggtttatagaaatgtagttatttgtaaattatcgacgtagtgaaaggggcgtagggaggtagttagagttttgtttgaatttgtatattggtttggtgtttgtagtatacgagattatttcgttgttttgtagaaggcggtggtggggtaagttcgggattttaatcgtcggggtggggggtggggggaagagggtgtttatgtattgagttttgaggtcgagtaaggagagagatttgttgagcggtatcgcgggtaattatataagttgtttcggtgattattcggaattgtgatgcgagttttcggttttcgaaagataagtttgaaagtttgtttgtttggggagtgtaagtatcggggcgtttttatttcggtttgggtagttaggatacgtttcgtattacggcgtttatttgtgcgatgggcgtcgggtgttgatgttgttgtttttaaagaatcggttatcgaggtagggattaagtgggggtattcggaattgatcgtagaggaggagttagttagaattgaggttttattgggtttttagagttttaagttttttttcggaggtgttggaaggttttttagggaacgtcgtttttagaaattgatttggtgttttggggagttttaaagtttttttttttcgttttttttgggcgtttttttttgttttttaagttttgtgttttttacgtgtttagaaatttgttcgcggtgtttggttttttttggagatgtttaggtagtttagttatttaggtttacgttggcgaggggttagagggagtagaacgttggttttgtcgggttgttatttttatttatatttatttttggttttttgcgttagttcggcgttgatggggacgggatggggttggggtcgggtatggttttcgttttttcgtttttcgtttttgtagatagtagtttgtttttgttgcgtttatttttttcgtttcgtcgtttttttttagcgtcgtagtttgtgtattacgttgatgggttttgatagagaaattatagtaagagtatgtttttaaattttgattttcgtttgtagggggataagttattttagttttgatatagtcgtggggaacgttgaagtttgggatatattggttttgaatttttttttttttagttcgtagttaggagatggtgatgtgtatgggtggggagtgttttgtttttgttatattttagcgttttgaaatttttcgtttttttttattgaaattttcgatttgtttgaatttgttttttgttgtaaaataaattttttttttcgtagatttgtggggtttttcggattttttgtcgttgttatgatttttaataatgcgattgaaaagttagtgttcggttggaaaaaaatttttaggtgttagtcggtcgcgttttgattttgttgaaggagtttttaattcggttgttagaggggttttggtttagtcgtgggaatttaggaagaaggagggcgtttcggaggcggttgggttagtttttcgggtagggcgggaattaggtcgcggcggggatcgtagagggggaggggacgggatttcgcggtaatttgtttttcggcgagtcgggttcgcgtattttagttttttcgttttagtttttcgtggttcgtttttttcgtcggtttttagttgttttcgtggtataggagtcggtcgcgattttttcgcgtttttcgtcggagttcgcgggacgtcgttaattttgggtttttcggtggtcggagtagcggtgcgaattagcggggcggtcgggtgggcggggtttgggcgggaaattggagtcgagaagatcgcgttttaggttaagttttagtcgtaagcgtcgcgcggtatagtgtagggtttcggtcgcgtttttttttcgttttcggttcggtcgcgtttttgcggatttatagcgcgtttcgggcgttttgtagttgggtttttagcgggggagtttttttcgttaaagttacga

SEQ ID NO: 11534 - DNA, 384 bp, Artificial Sequence
  Description of Artificial Sequence: Synthetic polynucleotide
cggttggtcgggggacgtgttcgcgttgtttttttttcggtcgttagggggcgtaggaagaagttttggaggtttgtttcgggatcgcgtattcgtttttttttttcgttagttttttttttattttcgttgagtttcgtttcgtcgtttgttttttgcggtattcgttcgtatacgaatttagttcgggaatcgagttgcgggagtgcggtttgtgtcgtttcggttaggagtttgtcgattgtagacgttttgcgaatcggtaagatgtgttttttggggttgtttttttttttatcgtttcggggttaagttattttatatgagtataataacgagttggtgacgggtagtagttatgagagttcgtttttcgattttcgg

SEQ ID NO: 11535 - DNA, 1432 bp, Artificial Sequence
  Description of Artificial Sequence: Synthetic polynucleotide
cggacgttagggggtgtttttagttttagcgtagaatttcgtttcgtataatttatcggattagttaggtcgtcgaagggtattaggttttagttattacgacgtttcgttcgacgggtcgtagttatgtaggagtggtagaggttgtttgacgaagttttttttgggggtcgatgttttttttcgggtgggaaggggcgttgtcggtgagggttattttggcgtcggtttgcgtcgttcgaagtcgggggggaggggaggttttcgtttagtaggggttacgttcgtttcggacgggggtcgcgcgggcgtttaggcgacgtattttcgtcggggttcgtgatcgttacgttcggcgggcggcgttgcgttttttttcggggtttcgtttaaggttgtagttcggttcgcgtcgtttttagggcgtttttttcgttcgcgttgggagttcggcggtcgcggtttttttcgttagttttagttgtagtttgtttttgttgttttttttcgttcgttcgttcgttcgcggtttgtagttttcgggttcgtttcgaggtggagggattgtttttttcgggggttgtacgtattcgtagcggtttcggtttttcgtcggatatatatcggtttttgtaggttgtaaagaatagcggcgagaatgtatcggttttttttttttttgttttgagtttcgggtgtggggggaggggaagtcggcgaatagcggcggcggtagcggcggcggcggcggtagcgggcgacgtaagttcggatgtagtttcgggggtttcggcgttgagaaatagtcgattttagtggcgtaggacggatacgaggacggttcgggggattgtgtatcgggtgtgcgagttcgtaagtcgtagtaggggtcgcgcgcgttgggtttttacgcgtttatggtttcgggcggcgcgcgggggttttcggggtcgtagtttcgcgtcgtttggcgcgcgtcggcgtttcgtttggttttaggttcgggtgtcgcgcgtcgcgttttataggcgtcgggttcggttgttcgtttttttcggtcggcgcgcgtagttttttcgcggagtagtcggttaggtagttttgttcgttgtttcgttttggttcgattgataggcgcgagcgtcggtagtagttttcgcgtttcgtttttcgttcgtttttcgcggtttagtttaattagcggcggttgagaggcggttattagggtgacgcggtatcgcgttttgcgaggggcggagtcgggggtcgttacgcgcgtttttcgcggtaaaatttaaaggtcggtagggcggttttttaatttttttttttaagtagggacgaggcggaatttgtttcgcgaggattgtaattttcggtatgttgcgcgtcggcgtcgggtggaggggtttcgattgggggcgtagggcgt

SEQ ID NO: 11536 - DNA, 325 bp, Artificial Sequence
  Description of Artificial Sequence: Synthetic polynucleotide
cgttgtcgtcgttgttttttcggtttttttgttattattttttacgttttgtagttttgttttttgtttacgggttgttaagtcgcggtttggtcggtggtggtagtggcggagttagataaagttttcgtttttttcgttttagagttttttaggcgttttaagtggcgggaaggtcgttagttttttaggtttcgcgttttttgtttggcgtgggggtggggagtcgcgtttggttttaggagttttttggtttttgttaatttttcgtttttgtatattgcgtttattgtttgagatgcgtcgagacggttttcgttgacgt

SEQ ID NO: 11537 - DNA, 1242 bp, Artificial Sequence
  Description of Artificial Sequence: Synthetic polynucleotide
cgtttatagataacgttttttcgtcgttggcgttggttcgggatgcggtttcgagatttttgtagtcgcgcgttggtttaggggattttcgtaggacgcgggcgggcgtcggggtcgggtcgggtttgggtagagtgataggtttttagtcgtgagttttataagtagatttatttataatatttcggataggagtttaggtcgcgtcgttcgcgtcgttcgcggggattcggcgtgaatttatacgttttttttttatcgtttcgtcgtttgttacggtttcgagattcggttagttttttcgggggtttttttcgtcgcgtagtatttcgttcgtgagtagttttcgtttgcgtttttttttttttagggcggtcgtttttattttcggtttttatttagcggggatttattagggcgagggttgaagatttcgcgggacgtcgcgcgtcggggatagcgacgtatttatttttttagttatttgggaggttgtaggttcgggtcggagttcgaggtttaggggcgcgcggagtagttttggttaaggcgtagggcgcggggttgtatgggggtttagtttagcgtgtatatcgtgtattttttagcgtagggtttcgcgttttttcgtagttcggtaacggtcgttattttagagtttcgtttattaggagtttcgtttagggtatcgtttattcgggtttcgtttttatcgcggttttcgtcgtggtttcgttttcgtttagagtttcgtttttagcgtatattgcgttagtcggatttgttttgtagttgggttttttggaggtttttatttcgcggttattgaagcggatgagtgtgaggttgattgggggtttggggatgggggatcggagattattaagaatatggttgtgttgggaaatttttttttagagtagagagggagggttttttttcgtcggggtgttttttattttttagtttttttcgcgtgggttcgtattttagttagaggggatacggcggttaggtttgcgttgttgcgtttgagtttaggtcggtagaggtcgtagatttcggttttttagtcggtagggattcgtaggtgcgcgtttttacggacgtttttcggggaagttcgagttcgttttttgtaggtcgggaagtattcgtttcgagacggtcgtattttcgtagcggaagggcgtttgtattatagttgtagtattagcgcgtgcgaggcggggttagggtcgg

SEQ ID NO: 11538 - DNA, 1460 bp, Artificial Sequence
  Description of Artificial Sequence: Synthetic polynucleotide
cgcgtttttgttttttttcgatttagtcgtaaatttcgagttttagcggtcgttttttttttttttcgttttttttgatttaaggttttaaaagataaacgtgttatttttcgtttcgtttttggattttggtttcgatcgaatgtagtggggatcgagaagcgtaaggtttaggatttgttagaggggcgcgttaagggcgtttttgtttcgttaggatattatcgtttgggtattttattttattttttcgtagttttttttggggtcgggcggggcggggcggggtaggggggtcgggcgcggtttacgcgttttttcgagtgcgcggtgcgggacgggcgcggttgacgcgttttcgtcggtgtttgtgttttttcgtaggttaggagggtattttgcgttgttattcggatttggcgggtagcgagttgtagcggggtacgtttacggtcgagtcgtagcgggaatagagcggcgtaggtttgaggagtttgggcgcggacgagcggttgcggttggtcgagtttaacgcgtagtatcgcgcgcgtttcggtttttttttcgtgttcgtcgcgcgttttagcgatcggacggcggtgtcgcgcgagttggcgcgtcggttgttttgttcgttcgcgtaggagttgcgtattgttttgggcgaggtgaagaagatcggtagtttgcgtttggtcgatttttttcgcgtagatttcgttaagttgtagttgtcgcgcgggttagggattcgggacgtataatcggacgcgcgggggttacggttcggagttgtgcgttttgggcgggaggcggattcgggtttggaatagcgtttatatacgtgtataaaggaagtggagaattgaggtaattatacgagtaatgagtttttttgttcgtttatttatacgcgtacgcgttgttaaaatatttatattgtttagtgttttgtttcggatttatttagtttattgttttaattttttattttttttgcggttttcgatattatcggtttttgtggattttaaagcgtttatttagttttttttaatttttttttgttaagttcgaattgtaaagtaaaacggacggaaaaggaattttttatgttatagcggtttgtttgtttttttttttttttattttatttgttgcgttcgatttttatatgtgagcggaagcggtgttttcgtttttgggtattaggggagtagattgggagttaggaaagttaaacgttggtttcggttcggtttggggagtcggggaagtcgtaggaaggaggcggtgggtcgggaagagttttgcgaagggaagagttaatcgaagggttgggaaggcgtttcgtggggacggacggaatagttgtagttatcgtttttaaaaggcgggaggcgtttagttaaagatttttttcggaggtcggttttgggggggtggttcgattgtttcgg

SEQ ID NO: 11539 - DNA, 1064 bp, Artificial Sequence
  Description of Artificial Sequence: Synthetic polynucleotide
cgattggcggttgtgtggcgatagcgtacgtttagtttttggaaagttttgtagtttattaggagagttttcggggcgtttttttttttggtttttttagggatttgcgggtagtggaggagttttttatagcgaggtagcgcgtttaagtcggataggatgtttacgcggtatttttttgtttcgggttggaaggcgaattttaggtttcgcgcgtttagggtattgttggtttttagtagtttttttacgattagaggtaagtttcgagttataatttttagttgggtgaagattatttttatttttagtattagtggtagtattattgttttttcgggcgcgttatagcgtagttgtagtcggacgcggtttcgagacgggttgcgcgcgtttaggtgagagtagcgtatttcgttagggttaaagtcgtacgggaagcgtttgggatttaggcggttcggtcgttgggttagtgcgtcgttgtttagtatcgaaatcgcgtagcggttttcgggttgtatttgtaatattaggttatgtaggggatttagttagattttacggtcgaaaggtattcggagttcgcggttcgttagtattatggtttttttagtagggatttttgtagttttcgcgagattaggggatagtaacgttttgtcgaaggtagcgggttgtgtcgggacgcggtttattagtgataggagaagtagtagtagtagtagtagtcggggcggcggtggcggttttggttgaaagttggtggagttgtttgttcggcgcgaggataattcgggagtttcggttgagtgtatggtttcggtgttcgggtttggataggttagtttgagagtatgcgaagtcggttttcgggtagataataagagatatcgtcgggaagtgttaggaatttcgcgcgttgttcgcggggtttttttgtagtcggggttgggttagaaggatggtaaagttgcgcggcgtcgttcgggttggagtcgtagtcgaggagtcgaagtttttttaggtcgtttagtttcgtcgttagcgttttaatcgcgcgg

SEQ ID NO: 11540 - DNA, 622 bp, Artificial Sequence
  Description of Artificial Sequence: Synthetic polynucleotide
cggtttgttacgcgttttcgtcggggtttattcgtatttgggtcggggttggtgtttacgcgcgacggttcgggagtacggatttttgtttttcgtagtatcgtttttcgggtggagtcggcggtttcgtttcgtagagttggggttgtatttggggtaacggggtcgggtttggacgttaggtcggaggagtagtatttgttaggagtacgtttcgtcggtaggtcgtaggagttttgggagtcgtcgttatgggtacgttcggcgggtggggggtcggtcgggttaaagattcggagttacgcggggcgggggtcggtatcgagggtcgggaggcgcgaagggtacgcggcggcgggaagcggggcgattcgaaggtttacgggggtcgggaggttgcggggcgttcgggattttttttcgggtggttatcgtgcggtcggggcgcggaagttagaggtgtttagaggcgtcgatttcgtcgaggttgcgattttggttcgttcgttcgtggggtattgtaattttcgtatttttattttgcgggtcgggagtgcgtttggagcgggacgggatttagcgggtgacggtaggggcggtagaaatatcgtttaattggcgg

SEQ ID NO: 11541 - DNA, 1622 bp, Artificial Sequence
  Description of Artificial Sequence: Synthetic polynucleotide
cggttttatcgggttgtaagggtcgggaagttgtgtcgggggcgttttagaggttagagttagggagggggttcgcgatataggcgggttttttaggcgggtttagggttaggatagcgcggtattattcggttagttttttgtagttaggatgaaggtcggggatagacgtttagttttagattttttagatagggttgggtagtgtcggtgggtgtttgggagaggcggaggcgggcgtatttttagtattaggttcgggaaggatacggtgtttagtcgttggagtttttggtttgcgtgttttattttgattttttggtatttggtgaacggttttttcgtagggtgggggtagttaggggatttgtcgaggaaagttggggatagcgggtttggtggcgcggttcggcgcggcgcgtgtttggggcgcgtggtcggttatagaattcggggagggtggaggttttcgggtacgcgtcggggtggtgggtagttcgggacggtagcggcgattcgttatttgaggaggggcggggattttatcgcggttaggtcgaggcgtcgagggttttttgcggttttcgttttttttcgttggtttcgacgtcgcgttcgggtcgggattcgagtttcggtttcgcggggtaggtttaggtttgcgcgttgcgtttgtagtcgaggtagaaattcgtttcgaggcgcgggcgtcgggttcgggttttaaggatgcgcgtcgggttttttttcgcggggatagtcgagtttcgtcggcgttttaggtgttttcgtagtgcgttcgggcgcggacgtttttttgttttcggaggggaagcgggagggtttttggggtaacgtttcgatttcgggttttttaatttgggtcgatagtcggttggtatagggaggtttgcgcgggagaggggcggagagagcgtagcgcggggtatagcgggcggttttcgtgtcgcgcgcgcgattggaaacggcgtgtagattttaaaacgagggttttatagagggttacgaggggtaggagagagttttcggagaattttagtttttcgatacggttattttttggtaaacgagcgagaattggggcgtagagttttgggagggtcgttttttcggcgggagcggttcgagtatagttttatagtagatgcgagcgcggcgggcgttttggtgacgaagtagcgggatttgtaggaggtagaggtttggtggggtcgtggacgttacgtcgagttgtttagatttttttagaagatagtggggattatttaacggtttttagtagaaattaagttaggtgttcgttttacggagattgttcggttgtagggtggaggttggatgagaataggcgtttttttaggtaggcgttcgtggtggtaacgttgtttaggaggagggtacgggtttcgggaagatttgcgaggttaaatcggtagtttcggagaattgagcgtaagaggtcggtgatatagagaggagttcgggaggtcgtatgttttaggttgaagttatttggcggggacgtttattgagatgcgaaatataggaagggatagaggttgcgtagagggaaaaggcgatggattcggttttggaaacgt

SEQ ID NO: 11542 - DNA, 324 bp, Artificial Sequence
  Description of Artificial Sequence: Synthetic polynucleotide
cgatttttcgagggaggagatagcgtcgtttttttatttgtataggtgttttcgtcgtaggtttcgtatatttatttatggtatttatataggggttcgaagaatatgttcggtttagttacgtggtagatgtagacgtcgtagtcgtagcggtttcggtcgtggtatagcgcggttttcgggggttgtttaggtgcgcggtagcgtcgtttcgattcggttcgggatagtttgtaggcggcgttcggttagtttttgcgcgggcgataagtaatcggtaggtcgggttagacgcggacgtcgttttttgtttcgaatttacgt

SEQ ID NO: 11543 - DNA, 1881 bp, Artificial Sequence
  Description of Artificial Sequence: Synthetic polynucleotide
cgtattcggtttcgaagaaggcgtttttcggataaaatcgaggaatttgttttgttttgtaaggaattagggtttgttgatttttagattttaacgagaatttttgtttttcgtaggcgttttataaatttttattggataattttatcgcgcgttattgggttttcgggagattcgtgatttttattcgttttgggcgcgggttcgtagagttttaattcgcgttttcggtagtcgggatttttcgttcggatcggtttttaggttggaaatattatggttcgtattcggggcgtagtcgagatttatcgcgtcggaggtttcgggattcgtttagatcgttgtttggttattttacgtttttgagttttttatatagttagtttcgtgattttcgagtttcgtgattttcgagtttcgtgatttttaagtttcggaagtcgttgtaggtagcggtttagttaggtttcgttttttttatcggagttttacgcgttaattttagttaggtttcgttttcggtcgttttaggcgtggatttaagttaggtttcgttttttgtttggttattttaggcgtttatcgttttaggcgttttttagtttaagtttaatgttcggttgttttagacgtcgatagttttatgtttcgttttttaatcggttgttgttggcgttttttggtttaggtttcgttttttattcggttgttttaggtattttttaggttagatttcgttatttatcggtcgttttaggcgttcgtagttttaagtttcgtttttcgttcggttgttttaggcggttttcggtttaagtttcgttttttgttcggcggttttagaggttcgcggttttaggtttcgatttttgttcggttgtataaggcgttttttgggttaggtttcgtttttagttcggtcgttttaggtttcgtttcgttttttttgtgcgcgtttcgttcggtagtttgtgggacgcgatcgcggcgttagtttcgtttttttgtgttgcggcggcggtttttcgagtttttttcgacgcgttttttaggttagcgagtttcgcgtttttcggtgacggattatgtcggcggcgggagcgggcgcgggcgtagaggcgggtttttttagcgaggagttgttttcgtttcgtttttcgttgtatcgcgtttgtcgcgacggggatttggttacgttttgttcgttgttgtagtagatattttacgtttatttggtttttgaggattttttttatggttggacgttcgtgtattgggtcgcgtatttcggtaaggtgggtgcgaacgttttaaggcgttatttttttcggttgtttagtgggagtcggggaaagcgggtttgaggtgcgggggacgtggggcgtgtcgggatcgcggggcggaagcgggatcgacggcgtttgtgtttcgaggggtttagggcgtttgtgcggtagcgttcgcggttcggagtcgcggcggggtagtcggggggcgcggggcggaagcgaggtcggtggcgtttgcgttcggaggggtttagggcgtatgtgcggcggcgcgcgtagtaagtttttaataaggcgggttttaagggtttcggcgtttgttggtcggattttgtgcgagcgcgcgcgcgcgcggatggtgcggggttttttaggtcgggtcggaggcgcgagcgatttcgtagagtcgggtattaggtcgcgaagtcgtttaggcggttttcggggagtcgagttggggttagaggcgcgcggggaatgttcgggcgcggtcgattttttggtttcgtatagtttcgttagtagtcgagggtcgcgttgcggacgagtttagtcgaggagtaagcgtttcggcgggattggaaggtttcgg

SEQ ID NO: 11544 - DNA, 944 bp, Artificial Sequence
  Description of Artificial Sequence: Synthetic polynucleotide
cgtttatagggcgtcgcggcggcgttgtagagtttatagtagttcgtgtcgtcgtttcgttcgttagcgttttagcgaggaagtagcgcgtagttcgcggtttagcgtattcgtagtagcgttcgtagttcgttcgcgttatgttttaggcggtcgagcgtttttaggagtgggttatggagggttttcgcgacgggttgaagaaggagcggttattggacgatcgttacgatagcggtttggattttatgaaagacgaggagtacgagtagatggttaaggagttgtaggagattcgtttcgagtcgtaggaggtgtcgcgcggttcggagttttggaagtagtagtttatcgaggacggggattcgtaagtggcggaggttcggggttgggggtcgtcgggagggcgggacgcgcgcggtttgggggtgggaggcgtcgggtttggagttcgagtcgggggattagcgatgtagtcgggcgggcgtcgcggtatttcggggtttttgtatcgtttcgaacgttgtagggttgtagggtcgcgcggggtatcggtttaattcggaggggcggcggttgggttttggtggatggtagcgtcgttatacgttttttttttttagattcgttttttaggtcgggggcggggcggtagcggggacgcgaagttttcggttgtataaggcggggcgggagtttttggtcgttggcgggcgtcgagtagtcgggaggggaagtatagggcgtttcgagttggcgggagggcggggcggtttggtcggcgttcgtcggggtcgcggggggaggggggcggaaagtttttgggcgtttgttaggaatatttagtttataataatttcgcggaaaatatcgcggtttcggtttttagaaatttcggttttgcgtaatttttcgtagttcgcgtttttttgggttttacgcgg

SEQ ID NO: 11545 - DNA, 1514 bp, Artificial Sequence
  Description of Artificial Sequence: Synthetic polynucleotide
cggagtcgaattcggtgtttttgttcgtttggggtttcgttagcgcgtcgtaagtttttttagaaatttaaattttgtaggtcgtatttttaattcgtattttatttaggttttcgtttggcgtcgatttgttttagtttaattttcggtttcgtagattaggtatttttcgggacgcggggtagattttgcgttcgggttttttttcgtagtcgggttgttcggtttttgcgcgcgtataataggcggtacggcgtagttttcgggagcgcgggattcgggtgttagtttcggcgtttagttatagcgatatagatttgggtgtcggggttcgttagggagttttgtgattcggggattttcgcgatgtagagaattagggatcgcgtacggagtttaggcgcgtagtttgtagttaggattagtttttcgttttcgtcgttgaagtcgtttcgagttttacgtttttttcgttgtcgggttcggttgttttagggtttcgttcgttcgttttagagtgagcgattttcgatttacggagaagcgattttattatcggtgttcgatatttagagttaagggagcgagaagaaggcgaagaaagaggcggagagcggtgtattgttttcgttgggattcgcgatttttagaaattttttcgaaatttagtttcgtcgtcgtttcgtcggtagggggtatagcgggcgttcggggcgcggcggttgagcgatggggcgagcggaaagggtttagacgtttggtttttgtttatatttcggagaaagttttgagtattaggcgttgggttttttggttatttttttgattttttttatcggcgtcgagtttgttttattttttttagttttttggtttcgttagttagaggggcgtttcgcgttcgtttcgttttttatttacgtttttcgattcgattcgttttttcgaattttcgttttttgagatttcgttttcgattcgttttaattggtcgcggcggtagtcgagtcgcgggagttgcgcgttgagttcgcggtagtacggggagcgttcgttcgtttcgttttggatttaattaagcgtttcgcggaggggtgcggttatttgggggtaggagaaagcggagtacgttatttttttagggatttaggaagcgaggcgagttttaggtggacgcggtggtgtggattacggcgattagggtttttttttttgttgtggagacggaggtgcgaggggacgtcggcggttttttattttttggtcgagtggtttttttcgttttcggttggattttttcggggcgttttttttagagtcgagtcgggttggtcgggggcggttgtttggtttgagtgtcgttttattaaagcggaacgtcggaggggaggttatttcgagagaaggcggttttcggcggaggtggtttcgtgaattttgtagttttttgttcgttcgttattcgagacgtcgcgtttcgtgggttttacgttggatggagggggcgtcgtcga

SEQ ID NO: 11546 - DNA, 2144 bp, Artificial Sequence
  Description of Artificial Sequence: Synthetic polynucleotide
cgcgtttggatgcgtttttcggattcggttttatataagttttagtttttcggattttgtatttttttcgcggatttttttatttttttatttttaggtttagatttttttttgtcggaatcgttacgtttttttatttttttattttcgttttattcggtttttttttttttggtttttattcggttaggttgtttcgttttggtagttttcgagggtcgttcgaggttttcgtttattaatcgttttcgtttggaagaatgcgttcgttcgagcgtattttcggcgggtgttaaagtttttcgttttaataggtgtttttgtttggttacgtatagttttgttatttggggttcggacggagacggcgataggatcgttttttgtagggcggttgcggtttcgtacgttttcgttcgggtttttagagcgttaagggttttcgtagtttcgtcgtcgttttcgttgtgttatattgtttttgtttttttgttcgtttagatgtcgcgaggttgattttatgtaagggtatcgttaagttcgggcgttgatattgtttatttattcgtggtggcggattttaaggttgggagtgagagacgcgtatagtgcgagatttttttttaatttagagaatttcggggaagttgggtgttcgcgtcgaagaagcgggtttaagttgattcggtttagaagggggttcgaagttaggcgtagcgtttagagagtttttttttatttacgtttttattcgatgttttttgtttttagaaggttggagaggggttgcgtattgttatttacgcgttcggttgcgagtggtttttatcgttcgttcgtcgcgcgttgggttcggtagtttttcggggtatacgaggttttcgtagtttttagattttcggtttcggtagcgtagagtcgggagagtcgttacgtttttagtcgcgcgcgtacgtcgggtttattaaatttgtagtatttttttttagtttttattttttgttatttttttttagtcggtgcgttttagtttcgtcgttcggtagaggttgttataataacgggtaggaatgttttaatatatataaagtcggttcggcgtagcgggtatttagttttggtcgggtttcgcgttttcggtcgtcgcgtagggtttggacgcgcgtcgcggttttttagtcggtcggtcgacgttcggggcgtatttataatgagcgggatggtgcggttttcgcggagttgtttcgattttttgtttgttttttgcgcgtttcggtcgtcggaggatgttgcgtgggttcggttgttttgttataagtagtagaaagtgtttaggatttaggttacggttaggatggcgatggtattggcgcggattttttttatggtgggtagacgggcgttttaggtgggggattgggtcggcgtgttttcggggtcggggcgggggcgttcgtagttttagttgtttgttttcgttcgcgtttagttgtttagttttgtagagtagaaaaaggagagaggtgggggggcgggggggtgatagggagagataggatcgcggagcgatttttacggttttaatgttttttagtttcgagcgcgcgcgtttttcgggcgtttatttattcgtgcgtagggtcggtttcgcgttttagtcgtcgtcggttgatttattaggttattgcgtattgggagagaagcgcgtcgagtgggaagcggcgcgggtttttttttcgcgttcgggaattcggcgagatagacgttcgcggcggaatggcgattggttaaagttagtttcggtttttatcgttaggtgatcgaacgttcggtagttgttttcgcgcggttttggtcggttttgtcgatttatatttattttcggatcgagcggttttgagttatcgattggagacgcgcgattttcgatttgggttcgcgtcgcgagttgtagtttcgggttgcgttttggcgcgggatttaaggtgtgttcggcgagtttttgtgtaggggcggttgggcgggggagagttttgagtttgtattggaatttgtagttgagattagttagatcgggttcgtttagaggagggattggaagttggtgtatttgatattcgaagagcgcgaaggggaaacgacgt

SEQ ID NO: 11547 - DNA, 379 bp, Artificial Sequence
  Description of Artificial Sequence: Synthetic polynucleotide
cggtgcgggttcgtttttttttagtttagtttttttgatatcgttttttttttggggacgttgtttgcgggttcgcgcgttttcgttttcgatttttttgtaggttttttcgggggtcggggtaggatcgtatttatcgaggattcgggcgttggagttagtagtagcggtacgagtaggagtagtcgtattttagtttgcgggagacgtattgggttagagcggttcggggttttcgtagttgttttgggcgcgggcgagagtgtgtgggcgcgtttttttttatggtttataggtgattaggagattcgtaataggatagtcgggtgcgtttcggtgtatcgtagagaatatagcgtgagggcgtttcgtcgggcgg

SEQ ID NO: 11548 - DNA, 637 bp, Artificial Sequence
  Description of Artificial Sequence: Synthetic polynucleotide
cgtcgttttatttttaataagtcgaagtttttgaaggaggttcggtgttatttcggtgtgatcgcgtttcggcgacgttgggtagggtgtagggagttagttcggtcgcggtttagcgggaggggagggggtcggtttcgaattcgggcgttcgggtcgcgggtgatttattgggaacgttaggttcgcgcgtttagatcggcgggcgacgtttagcgcgttttacgtttttcgttcgggtcgttcgcgtagaagtagttttcgcgtatttttgtttttcgagacggattcgtcgggaaggagtttggagtcgggcggtcggcgggtagtaatttttttttttttagttattatggtcggtgcgattttttattcgcgttcgtagacggattttttggaaagtatcgggttgggtttatttgattggcgttcgtaggggtcgtcgatttttttatagatttacggaaattgtcggtcgtaagtcgaggttcggtttttagtattcgtcggttcgttcgcgtcggttttttaaagagttgttagatttattcgttagtagtttttttattcgatcgttttgtaggtgcggtgggtttttttttcgttttcgacgcgcgtgcgtattttcgtgtcgcgg

SEQ ID NO: 11549 - DNA, 959 bp, Artificial Sequence
  Description of Artificial Sequence: Synthetic polynucleotide
cgggagtggggcgggtaggaacgagggtttgagtttaggatcgtaattttcgtgaggggttcgaggattttagtttaacgtttcgtcgggtttcgtttttatttttttttttatggcgagttcgtcgaggtttcgtcgtttcgttattcgtttttagcgtcgcgcgggttttgttatcgcgtttacgttcggttaggcggcgatttttcgcgttttgtttcgtcggttgtcgggggtttaagaaatttcgggggggcggggtcgggggcggggtgaggttttcgggggtcggggcggggtcggggagggggcggtggggtcgggggttcggtttagggcgggaaatgggtggggaggggcggggtttgggttggagattggacggaggagtcgggcggagatgtaattggaggaagagggcgggacggggcggagaaggtttttcgtatcggcggagggagagggattaggagggggttgcggcgggggaggagagggggttttcggtttagagattgaggcgagggtggcgggagcggcgcgtaggtagggttggggtggggcgtatatagtgagcgttgggggcgttggcggtggagtttttgaggtttttcgaattagtgggttggggttgcgagatcgagtcgagttgttttgggcggttagagatgtgggtatatagaggttttttttttttttttttcgacgtcgggtagtgggcggtggtttggttttttttttggaatttttgggcggggtcgggtttggagtttgggtttttgttcggagggtggtgttataggaagagttggagttgagagtcgggatttcggggtttttttagggggcggttcgtttttggtttttaggggtttttaagcgtagtgtttttttgttttttttgggtatcgtttaatttttttcgtatttgagggtcgattattttttcgatttcgcgg

SEQ ID NO: 11550 - DNA, 826 bp, Artificial Sequence
  Description of Artificial Sequence: Synthetic polynucleotide
cgtttatttttgcggcgtcgtgaaagaaggcgtaggaggagggagttttgatattttttttcgggttggggttttatagcggcgaaaagacggagggagtgatcgggggtcgcggggattttttcgggacgggttttcgtcggaggagtttcggaaagtcgttttttattttcgaggtttcgtttgcgcgggcgttttattagcggtcggggtggtggcggcggcggcggcggcggcggcggcgcggggcggggcgtcgcgatttttgttttttttttgggtcgagcggtaggcgcgttcgtatcgttttcgttttttcgtcgtagtcgttgtcgatcggttggttgggttttgcggcgtgaggatttcggcggcgtcgtagtttcgcgagttatggtttagttcggcggggaggttcggttcgggtttaagacggcggtgtagattcgcgtcgttatttaggaggtcgaggacgtggacgagttggaggacgaggaggagggggcggagattcggggcgtcggggattcggttcggtattttagtttcggttggggtagcgcgagcgaggaggagtcgagtcgcgggtataggtaggcgcggcggttggttcgggaggtgggtttcgagggggcgtcgggtcgcgcgcgagttcggggcgttgattgcgcgcgataatttttcgggtagagggggttgagttagtttcgtcgtcggggaagtagtttcgggtcgagtttttgagttagaatcggttcgtggaggtagtcggtgttttagttcgtagtttcgtcgtttaatcgaggtttttagggttggcggtcgg

SEQ ID NO: 11551 - DNA, 2156 bp, Artificial Sequence
  Description of Artificial Sequence: Synthetic polynucleotide
cgttcgaggaatcggtttaatcgtttttcgttgtagtcggtttgtttttttttcggaattatcgagggagaggcgcgtgcggaggtcggcgttcggatttcgtattcgttattgttgtcggcgtattttttcgaagttttatttcgaagggttgggttttattcgcgcgttttgtgcgtgtttttttgtttttttacgttttttttgtttggttgttgcgaggttttgtaggggaaagattggcgcggggttcgtattttgtttatgttataggaaaatcgtgggagttttttcgacgcggcgtattttcggaagttttttttttaggagggttgcgggaaggtcgggattttgtatttagacgaattcggtcgttttttaagaggaaagtcggagatttagttgaggggtaaaaatgttagggaaaggcgagtttagagtttggtgatggagaaattgggaagttattttttattttttaattttaggatggggaattcgtaattgaagtcggagttttagatttggggcgtatttttagtttagtttaggaaagagatttaagggcgtagtagtgtggatattttttatttcggtttcgaaggtttagcgagggtttaatttgggttttttgttaggttcgtttttcgtttttttttagttttcggttcgtgcgtcgttgtttttttaagaagtttaggtaggtaggttcggttgttggagtcgtttttatggtaattcgcgagttgcggcggttttatgaatatttcggggcgcgggagttcgagcgttgtcggagggcgtttcgggggaggcggtcgttgatgtaagttcggcgggtcgttgggtttcgttcggttgcggcgggagtttcgggacgggtcggacgggtcggggtagaggaggcgaggcgagttcgcgggtggttagttataaagttcgggcggcgagatagacggatagttagttttttcgcgggacgtacgttcgggattcgcgcgggtcgtgcgttttgtatttcggagcggttttttgagcgtcgcggtcgtagagttttttcggtcggcgtttattgtttttcgcgggggcggggcgtttggagtcgggcggcgcgtcgcgtttttgaacgttagagggagggagggaggtaagaagggagcgcggggttttcgcgtttagtcgggttcgggaggaggtgtagcgcggcgagttcggggattcggagcgggattaggatttttttcgcggcgcgtagtttgtttaagtatgggcgtttgaggttgtttttacgtcggcggtaaaggacgcgtttttacgggcggattgatcggcgggcggatttggagttcgttcgcggcgtcgcgtttttgttttcggttcggttcgatttcggtttttggcgttatggataagttgtcgtcgtttatgcgtaagcggttttatagtttttcgtagtaggtgggggttaaggcgtggattatggacgaggaagaggacgtcgaggaggagggggtcgggggtcgttaagattttagtcgtaggagtattcggttgcggttattgttttcgttttttttttcggcggtcgcgggtggtacggagtttcggagttcggttttcggggtagcggatagcgaagggtcggttcgcggcgcgggtaagtttagtacgaacggcgattgtaggcgttttcgcgggagtttggtttcgttgggtagtcggggcggcggtagcggcggtacggggagcggtagtagttacggatatttgtatgatttcgcggaggagcggcggtttatcgtcgagggcgacgcgtttttcggcgaggataggacgtttttaggtttggcggtcgagttcgagcgtttcggcgtttcggcgtagttcgtagtttcgtcgtcgtcgttttagtagttatcgtagtcggttttcgttttttgcgagtagttttcggtggatatcgttattaaagtggagggaggcgcggttgtcggcgattagattttttcggaggtcgaggtgcgtttgggttaggtcggttttatgtagcgttagttcggggttatgttttaattcggggttaataaattttttttaaggatgttcggtagttagaaagtcgtggagcgcgaataggagagggttaagtcggtcgg

SEQ ID NO: 11552 - DNA, 1441 bp, Artificial Sequence
  Description of Artificial Sequence: Synthetic polynucleotide
cgtaaggaggaaaacgtggaatcgaatatagtagttgcgggatcgtattacgtgatttttttttcgcggtcgttttatagaatttgtgggaaggggggggagggggagtgtcgtcgtaatttcgaggataggttagtagttcgcgggttcgattttagtcggcgttttcggggttattatattttttcgtcggcggggaaattatattttttatacgttcgaagtcgtcgttttttcgatacggttcgttcggtcgtacgtatacgttacgggtcggcgtttttcggtatacgcgcgaaggtcgggtttcgtttcgttttttatcgatttcgcggagcggcgattatcggttttaattagtttcggatttcgggcgcgttcgggtcggtttttttttcggtttagttttcgttaatcgggggatttatttcgttgaattcgtttattcgggagggcgcgttttcgttttattgttttatattcgagggtaatagcggtcgtatcgtttatttgggtcggggggtttttttttcgttttcggtcgattgagtcgggttggggttttcgaggaagcgcgggtcgtcgggcggttggaagtgggggaaggagaggagggggagggggtcgggatatcgggagtcgttttttttttttttcgtcgattgcggttttcgtaggttggtcgggcgttttcgtatattcgtttagttttttatagtttcgcgtttcgttagttttttttttattttatttttatatatttttatttttatatatttatattcggtcgtttttcgtttttttattcgtttgtcgcgcgcgcgcgcgatttcgtttatatatagcgcgcgcgacgtcggcggagatcgtttcgtttttttagatcgaacgtcgttcgttcgtttgttgaggagcggcgcgcgtttcggtttcgtttttttggcgtcgcggcgcggcgggcggggggcggcggtcggaggagttgggggtcgggttagcgcgtcgagtattgtcgagcggatttgatatttgcgtcgagagtcgtttttttagtttttcgttcgtattcgagttatcgttggtttcgggggaagagaggcgatggatcgcgcgcggggagcgaaaagggagcgcgagggcgtttcgaggacgcgtttttttattcgtttttaaatcgtttttattgagaaagggaaacggatggggggggtggggggcgaggtttgtttttaattcgaaatcgcgagattagtttttttcgttgtacgtttttttcgtttttatattttttgtttaggttttattaatttgcgtttggaatttcgatacgagttttttattttttcgggcgtagggttttgtcggtatttcgacgtttttcgtttagttttttcgtcggtcgtcgttcggagttttcgtttacggtggttttttttttcgg

SEQ ID NO: 11553 - DNA, 734 bp, Artificial Sequence
  Description of Artificial Sequence: Synthetic polynucleotide
cgggtttcgttcgttttgtttgcgggtcgatttcgcgacgtcgatcggttcgcgttttcgttttcgagcgtttcggcgggcggagttgcgggtgaggggggggttggtttggggggcgggggtttcgatgacggtatcggagcgcgtcgtattggggatggaaatttgattgtttggttcgggacggcgtttgtagttaggtaggtgagtgtgggtcggagagcgggttaggggcgaggatcgggtgggtggagggaggcgcgcgtttttttttcgcgtaggtttgggtttagtggttttgggagtcggtatttttgggagatttgattcggtatgaggagttcggtatttttgttttttagttttttggaagtttttttttggattggtcggcgtcgttttttcgatatttgggggttgaggtcggtatttcgggtttgcgtggaggggcgagcgttaaggttgcgagagtcgggtttcgatttgtaattattttttttaatttttatggagtttcgtttcgcgttcgtcgtttttagttttagttgttttgtttcggtttcgaatagcgtttgcggggttgttagagtattttcggagcgggagcgttgtgcggagagtaggggcgcgcggaagtcgggattgtatcgggttcggaacgtttacgcggaggggtgcgcgaaggtttatacggtattgcgaggtagagtttatcgttgtgtgtttagggtcgg

SEQ ID NO: 11554 - DNA, 935 bp, Artificial Sequence
  Description of Artificial Sequence: Synthetic polynucleotide
cggcggtgtttagggggagagggttttagcgtcgtcgttttttaagtcgattcgttcgtatttggttttttttttatagggttggagtttggatgaagttttttatttttgttagattttagtcggggggtcggcgtcgcgaggtttttatgcgcgtttttaaagttgtcgcgggggaggggttatttttcgttcggggttgagattagtcgagtttttcgtttttgttcggttcgtttatttcgggcgtatagcgttagtcggagtagttttagtagttgcgtttttagttcgtacgcgtttaggtttagtatggcggcgcgcggttcgggcgtcgcggagtcgtcgaggagtcgtcgttcgtttcgtcgtcgtttcgttcggcgtttagtttcggcgcgattgcggtgagtttatttcggtcgggagcgtttttcgcgtttagtcgcgttcggtagagagtttttagtcgtttcggatttcgcgtagtttcgtagagacgcgcgtgtcgttcgtacgggtcggtattcgggtcgttttcgtcggcgtgttaggatttcgtatagaagcgttcggacgcggacgtacgtagtcgcggttacgattttcgtcgttcgttcggttcgtgttcggttttggttagtagggttgttttatttttacggcgcggcgggagttcgagggggttttttgggaaattttttgcggggcgtcgtggcgtaggtgcgtttttatttttagggttttattattcgcggttatatttggggtcggatcgcgcgttttttttttttttttcgtttttgagggagtttttgtttgggtcgagggggatttcgggggtttgtttagttttggggtgaggggttggtttaatattttataggtttacggttattagtagggcgggattatagtgggcgcgggtcgtacgt

SEQ ID NO: 11555 - DNA, 1054 bp, Artificial Sequence
  Description of Artificial Sequence: Synthetic polynucleotide
cggggtgggggatattcgggttgagttagttaagtcgggagtgtgaggagtagcgggggtcggtaggaacgtggacgcgagattggggagtagtggggttgtttgtgcggggatgtagtttttattaagtatacgggtcgagggttgattataggtagagtagcgttttttggtagcgttgcgggtgtggatgagggaagttaggtttcggatttatatttagacggtcgttttttagtttgtttttttttttttgtgggtttttaaagtgcggtttggtttttttatttcgattttgaggtttggaggtggggacgggattgtgggcgtcggtaaacgtgagttttcgagcggggcgggaaaggagtttcgcgaatgttttttttagtttcggcgttttacgtgtaggtttatgattgggagcgtttttaatttaaatcggtattgcgtcgggattattttttttttggcgtcgttttcgtcgtttttttcggatttttttcggttttttttttatttttcgttttcggggtttttttttgttgagcgggggttgtcgggatttgggattgcggggttgtttcgatttcgtagtcgttcgcggtggaagttagttcgggtttggttttgagcgcgcggttggggcggtcgttgtttatggtgttggcgcgggtggcgcgtcggtcggcggggtttgcggaggtttaggcgtttttggcggggaaggcggcgttttcgggtttggggagcgagggttttcgttttaggggtacggaggatatttagattggggcgttcgtgggtttggtgttgtcgtttcgggcgtcggtattttgcgatatttttttttttcggttttgggagggaatcgaggtagtttcgcgttaggttttttcggatatttggggtaaattcgttttttagagtttcgtgttttttttttaaatttgaggtagcgatttttttatttttaagggcggtcgtgaggtcgaattatgtgtcgattttagtcggtttttgtaaacgttgtgatgtcggttttcggaggtcgcgt

SEQ ID NO: 11556 - DNA, 1474 bp, Artificial Sequence
  Description of Artificial Sequence: Synthetic polynucleotide
cgttagcgtcgatgttgttgttttttcgttttttttatttttatatatttttattcgggttttcgcgggtttttcgaattaagtttttagtttagtttttttaaatagtttatatagcgatacgggtattgggtaattgtaattagttttaatcggaagtatttgtttgtgggtgagatttatttgattttcggggtcggtcgttataagggcgagggttgaggatttttcgtgggggatatgggttttttattagtcggaaagttttagcgatcggttgggcgtttttgggtcggattcgcgtcgtcgttcgcgtattggggttttcgaggtgtgatgttatttgttcgtagaatcggtttttttcgcgtcgtttttttcgcgtttttattttagtttttttttcgtcgttttcggggttaatatggtagcggcgtcgtcgttttattttcgtaatcgtacgattcggttggtagggtcgtcggttcggattttcgagatttatatttcggttaggttcgtacgttttgcgtttcggattttcggcggtttttcgtagttttcggggcgtcgattttcgttcgttgttatacgaggttcgggcgttttcgatagttcgggattacgttagagtgacgttatatatcggatttcggcgagttgcgggtatgagtaacgcgcgcgttttcgttttcgagtttttttcgtcgtcgcgtttatcgttgaagattatggcggtcgaggcgtttatgacggcgaaaaacgaagtatattcggggtcgtttttggattcggatatgtttgcgggtggggagggggtaagttttgtgggtcgaggcggtggcggaggcgggggcgaggacgggtcgggtacgaaggtttgcgggcgggcggcggcgaaggcgattcggttcgttagtcgttgcgttttaaatattagtatcgtagaataaaatggcggtcgcggtcgcgttatatgatttgggtttcgtttttgcgagtcgtattatttcgtatcgtgggggagacgcgttttcgggacgttcggtcggttcgttgatttttttcgggttgtgtcgttcgtttagcgattcggtttcggcgttcggtttcgttttgtttcggttttcgcgggtgttttcgggcgtcgtcggtttttggattttcgtagcgttggatcggtttcgcgtcggggcggggcggtgtggtgtgtgttttattagtatacggggcggggtttcggacgtttcgttttttttgcggttgcgcgtcgtttgtaggtgttgggttttcggcgacgtttttttttgtatttttggcgtgaagttgtaggtcgtggtttcgcggttttgtttttaagacggggttttattttttcgggcgttggttttttaggatttttttattaattttgggcgagttaagggttttagtagatgtgcggcgcgcgggttttttttgttatagcgttcgg

SEQ ID NO: 11557 - DNA, 357 bp, Artificial Sequence
  Description of Artificial Sequence: Synthetic polynucleotide
cgggagatttcgagattttcggtcggtgatagtaggcgattttttgtttttgttaatttgtgggtttttacggacgtggggaagggaggagggaggttttagttttttgcgggggaggggcgtgaagacgcgcgggggtggggggagatgagtcggcgtcgttatgataacgaggtcggtggttcggttttggggattcgggagggagggaggcgtcgtggtcgcgcgcgcgggcgggggcggggggttaggttttttaggagtagttggggaatattcggcgattttggcggttgttttttggtggcgtagggagttcgcgtgtttgcgagtgcgtgtgtgtgcgaagtttttcgg

SEQ ID NO: 11558 - DNA, 814 bp, Artificial Sequence
  Description of Artificial Sequence: Synthetic polynucleotide
cgtcgtttaagagtttggggtcgtggggggcggggttgtttgttatcggtttcgtttcgtcgataggattcgtttttttttttaggttcggcggggtcgatttcgtttttcgtttttagtttgtcgtacgatagcggcggcgcggcgggcggagtcgggaggcggggaagtagtggtcgtgtgagcgtgaggagttgtcgttatcgtttgtttttcgtttttttcgtttttcggggttttagcgtcgtgggtcgcgtacggttttggaagagacgtcgtttcgtttttattcgttttttttatcgcgtcgttttttcgttttgttttgcgggtttaggcggaattcggaacggtcgtttttttttttcgtttttcgtcgtcgttttttttttttttttttcggttttttttttagtttcgggtcggagcggggtgtcggcggcggtcggttcgggcggcggcgtttggttatgtcgtgtcggggaaggtaatgagtcgtagagtttcggggtttcggttgagtagcggcggtattaattattcgcggagttggaatgattggtaatttaggtgggtgatcggttcgggatttcgtttcgatttttcgggtttcgtttcgggcgggtcgaggtttagggtcgcggggttgggaggcgcggtttaggttttttatttatcggagtcgggcgcggttttttgggttttttttttttcggttaggggaggaaggtcgcggggaggcgaggtttaagtgttttttttttttttgtttgtttagttcggggttgaagtcgagtttcggggttttcggcgg

SEQ ID NO: 11559 - DNA, 847 bp, Artificial Sequence
  Description of Artificial Sequence: Synthetic polynucleotide
cgtggtgagatatcgatttcgtagagtagagggggcggcggtagaggggaagggttttcgtatttattttttttgtaggaggtgtatttgtatttttcgtatttgtaggagttcgcgtaggtgtaggagttatttagagagggcgacgttataggaagggttaatgtggacgaattcgggtttttacgtttgttacgaggagatggggtgttaagtttttttgtttttcgcgatataggtatgttcgttttttacgaggtgaagaatagggaattaggggttttttttttaagtgtttttgagcgaaggcgtagggcgtgggtttttttgtaggtataagggcgcgtagtgcgtaggatgcgagcgggggcgggggtttattagaagggtaggggtaggttttagggtttatgtcgaggagagtagtagttggaggcggtgaacgggtttttttaagtaattggacgcgcggtttggttagtggtagtaggtggcgatgtttttatagtttcgggcgggggcgcgtatgttaagttcgttgggcgttcgtttttgcgtatcgcgttcgtttttttcgtttgtgcgtttgggtttcggcgtacgtattgtatttgtcgttcgtttttgtcgtgtgtgtgtattgtcggggttcgttcgtttacgttcgcgcgtgcgtttttatttttatttcgtattcgcgtgtacgatttattcgtcgtcgttgtgcgcgtattgttagtttatttttcgcgtgggtttcgtaggggacgtgttcgtcgtagtagtcgttattgcgtggaagcgcgtacgtattattttcgaaagtggagaaaaaggcgttttgcgt

SEQ ID NO: 11560 - DNA, 589 bp, Artificial Sequence
  Description of Artificial Sequence: Synthetic polynucleotide
cgtgggtgtttcggaggaaacggtcgtagttttaaattttttagtttttttagtagggagttttttcgcggagtttcgtttggcggtcggaagttattttaagtcgtttattcggaagtcgtcgttttggtaattgggtatcgttttattttttttttttagtaacgtttatcgttttagacgtttgaggttagtcgagtttcgattggtttttttgttttttattttgggagacgtttgagatttagcgtttttagatttcgtatttgaatttgtggcgtttggtgttcgcgagttgtcgaatgaagttgagcgttttagtggaattagggattttaggggtgagcgatcgcgaggggagagcgacgaaaagggcggtcggagttggaggggcgcggagttaaataaaaaagggcggtcggagttgtaggggcgtcgagttaaatacgttatttttagatggggggttttaggcgagttgtttagtttttttgaggtaggtttttcgtttgttcgttttttcgtagtttttgagttttttttttacgtcgtttttcggtagttttagagacgttacgtttgttttcgt

SEQ ID NO: 11561 - DNA, 20 bp, Homo sapiens
cgtggtgcgcgcggcgggcg

SEQ ID NO: 11562 - DNA, 116 bp, Homo sapiens; identical to SEQ ID NO: 8448

SEQ ID NO: 11563 - DNA, 44 bp, Homo sapiens; identical to SEQ ID NO: 8459

SEQ ID NO: 11564 - DNA, 34 bp, Homo sapiens; identical to SEQ ID NO: 8470

SEQ ID NO: 11565 - DNA, 211 bp, Homo sapiens; identical to SEQ ID NO: 8481

SEQ ID NO: 11566 - DNA, 95 bp, Homo sapiens; identical to SEQ ID NO: 8492

SEQ ID NO: 11567 - DNA, 264 bp, Homo sapiens; identical to SEQ ID NO: 8503

SEQ ID NO: 11568 - DNA, 59 bp, Homo sapiens; identical to SEQ ID NO: 8514

SEQ ID NO: 11569 - DNA, 4 bp, Homo sapiens
cgcg

SEQ ID NO: 11570 - DNA, 324 bp, Homo sapiens; identical to SEQ ID NO: 8536

SEQ ID NO: 11571 - DNA, 102 bp, Homo sapiens; identical to SEQ ID NO: 8544

SEQ ID NO: 11572 - DNA, 24 bp, Homo sapiens
cgcaacgactcgctgccgcccacg

SEQ ID NO: 11573 - DNA, 521 bp, Homo sapiens; identical to SEQ ID NO: 8546

SEQ ID NO: 11574 - DNA, 1484 bp, Homo sapiens; identical to SEQ ID NO: 8547

SEQ ID NO: 11575 - DNA, 34 bp, Homo sapiens; identical to SEQ ID NO: 8548

SEQ ID NO: 11576 - DNA, 14 bp, Homo sapiens
cggcgaggggctcg

SEQ ID NO: 11577 - DNA, 37 bp, Homo sapiens; identical to SEQ ID NO: 8550

SEQ ID NO: 11578 - DNA, 34 bp, Homo sapiens; identical to SEQ ID NO: 8551

SEQ ID NO: 11579 - DNA, 538 bp, Homo sapiens; identical to SEQ ID NO: 8552

SEQ ID NO: 11580 - DNA, 109 bp, Homo sapiens; identical to SEQ ID NO: 8553

SEQ ID NO: 11581 - DNA, 901 bp, Homo sapiens; identical to SEQ ID NO: 8554

SEQ ID NO: 11582 - DNA, 15 bp, Homo sapiens
cgggcggcgcgggcg

SEQ ID NO: 11583 - DNA, 383 bp, Homo sapiens; identical to SEQ ID NO: 8556

SEQ ID NO: 11584 - DNA, 4 bp, Homo sapiens
cgcg

SEQ ID NO: 11585 - DNA, 624 bp, Homo sapiens; identical to SEQ ID NO: 8558

SEQ ID NO: 11586 - DNA, 94 bp, Homo sapiens; identical to SEQ ID NO: 8559

SEQ ID NO: 11587 - DNA, 63 bp, Homo sapiens; identical to SEQ ID NO: 8560

SEQ ID NO: 11588 - DNA, 41 bp, Homo sapiens; identical to SEQ ID NO: 8561

SEQ ID NO: 11589 - DNA, 1041 bp, Homo sapiens; identical to SEQ ID NO: 8562

SEQ ID NO: 11590 - DNA, 23 bp, Homo sapiens
cgccttcggctcgggccatggcg

SEQ ID NO: 11591 - DNA, 515 bp, Homo sapiens; identical to SEQ ID NO: 8564

SEQ ID NO: 11592 - DNA, 1017 bp, Homo sapiens; identical to SEQ ID NO: 8565

SEQ ID NO: 11593 - DNA, 8 bp, Homo sapiens
cgcgctcg

SEQ ID NO: 11594 - DNA, 54 bp, Homo sapiens; identical to SEQ ID NO: 8567

SEQ ID NO: 11595 - DNA, 10 bp, Homo sapiens
cgcgttgtcg

SEQ ID NO: 11596 - DNA, 26 bp, Homo sapiens
cgggcaggttcgaccaggcggccgcg

SEQ ID NO: 11597 - DNA, 934 bp, Homo sapiens; identical to SEQ ID NO: 8570

SEQ ID NO: 11598 - DNA, 279 bp, Homo sapiens; identical to SEQ ID NO: 8571

SEQ ID NO: 11599 - DNA, 2 bp, Homo sapiens
cg

SEQ ID NO: 11600 - DNA, 9 bp, Homo sapiens
cgccccgcg

SEQ ID NO: 11601 - DNA, 11 bp, Homo sapiens
cgagcgcatcg

SEQ ID NO: 11602 - DNA, 30 bp, Homo sapiens; identical to SEQ ID NO: 8575

SEQ ID NO: 11603 - DNA, 10 bp, Homo sapiens
cgctcccgcg

SEQ ID NO: 11604 - DNA, 56 bp, Homo sapiens; identical to SEQ ID NO: 8577

SEQ ID NO: 11605 - DNA, 98 bp, Homo sapiens; identical to SEQ ID NO: 8578

SEQ ID NO: 11606 - DNA, 33 bp, Homo sapiens; identical to SEQ ID NO: 8579

SEQ ID NO: 11607 - DNA, 48 bp, Homo sapiens; identical to SEQ ID NO: 8580

SEQ ID NO: 11608 - DNA, 42 bp, Homo sapiens; identical to SEQ ID NO: 8589

SEQ ID NO: 11609 - DNA, 40 bp, Homo sapiens; identical to SEQ ID NO: 8600

SEQ ID NO: 11610 - DNA, 2 bp, Homo sapiens
cg

SEQ ID NO: 11611 - DNA, 42 bp, Homo sapiens; identical to SEQ ID NO: 8622

SEQ ID NO: 11612 - DNA, 20 bp, Homo sapiens
cgcccgccgcgcgcaccacg

SEQ ID NO: 11613 - DNA, 116 bp, Homo sapiens; identical to SEQ ID NO: 8634

SEQ ID NO: 11614 - DNA, 44 bp, Homo sapiens; identical to SEQ ID NO: 8645

SEQ ID NO: 11615 - DNA, 34 bp, Homo sapiens; identical to SEQ ID NO: 8656

SEQ ID NO: 11616 - DNA, 211 bp, Homo sapiens; identical to SEQ ID NO: 8667

SEQ ID NO: 11617 - DNA, 95 bp, Homo sapiens; identical to SEQ ID NO: 8678

SEQ ID NO: 11618 - DNA, 264 bp, Homo sapiens; identical to SEQ ID NO: 8689

SEQ ID NO: 11619 - DNA, 59 bp, Homo sapiens; identical to SEQ ID NO: 8700

SEQ ID NO: 11620 - DNA, 4 bp, Homo sapiens
cgcg

SEQ ID NO: 11621 - DNA, 324 bp, Homo sapiens; identical to SEQ ID NO: 8722

SEQ ID NO: 11622 - DNA, 102 bp, Homo sapiens; identical to SEQ ID NO: 8730

SEQ ID NO: 11623 - DNA, 24 bp, Homo sapiens
cgtgggcggcagcgagtcgttgcg

SEQ ID NO: 11624 - DNA, 521 bp, Homo sapiens; identical to SEQ ID NO: 8732

SEQ ID NO: 11625 - DNA, 1484 bp, Homo sapiens; identical to SEQ ID NO: 8733

SEQ ID NO: 11626 - DNA, 34 bp, Homo sapiens; identical to SEQ ID NO: 8734

SEQ ID NO: 11627 - DNA, 14 bp, Homo sapiens
cgagcccctcgccg

SEQ ID NO: 11628 - DNA, 37 bp, Homo sapiens; identical to SEQ ID NO: 8736

SEQ ID NO: 11629 - DNA, 34 bp, Homo sapiens; identical to SEQ ID NO: 8737

SEQ ID NO: 11630 - DNA, 538 bp, Homo sapiens; identical to SEQ ID NO: 8738

SEQ ID NO: 11631 - DNA, 109 bp, Homo sapiens; identical to SEQ ID NO: 8739

SEQ ID NO: 11632 - DNA, 901 bp, Homo sapiens; identical to SEQ ID NO: 8740

SEQ ID NO: 11633 - DNA, 15 bp, Homo sapiens
cgcccgcgccgcccg

SEQ ID NO: 11634 - DNA, 383 bp, Homo sapiens; identical to SEQ ID NO: 8742

SEQ ID NO: 11635 - DNA, 4 bp, Homo sapiens
cgcg

SEQ ID NO: 11636 - DNA, 624 bp, Homo sapiens; identical to SEQ ID NO: 8744

SEQ ID NO: 11637 - DNA, 94 bp, Homo sapiens; identical to SEQ ID NO: 8745

SEQ ID NO: 11638 - DNA, 63 bp, Homo sapiens; identical to SEQ ID NO: 8746

SEQ ID NO: 11639 - DNA, 41 bp, Homo sapiens; identical to SEQ ID NO: 8747

SEQ ID NO: 11640 - DNA, 1041 bp, Homo sapiens; identical to SEQ ID NO: 8748

SEQ ID NO: 11641 - DNA, 23 bp, Homo sapiens
cgccatggcccgagccgaaggcg

SEQ ID NO: 11642 - DNA, 515 bp, Homo sapiens; identical to SEQ ID NO: 8750

SEQ ID NO: 11643 - DNA, 1017 bp, Homo sapiens; identical to SEQ ID NO: 8751

SEQ ID NO: 11644 - DNA, 8 bp, Homo sapiens
cgagcgcg

SEQ ID NO: 11645 - DNA, 54 bp, Homo sapiens; identical to SEQ ID NO: 8753

SEQ ID NO: 11646 - DNA, 10 bp, Homo sapiens
cgacaacgcg

SEQ ID NO: 11647 - DNA, 26 bp, Homo sapiens
cgcggccgcctggtcgaacctgcccg

SEQ ID NO: 11648 - DNA, 934 bp, Homo sapiens; identical to SEQ ID NO: 8756

SEQ ID NO: 11649 - DNA, 279 bp, Homo sapiens; identical to SEQ ID NO: 8757

SEQ ID NO: 11650 - DNA, 2 bp, Homo sapiens
cg

SEQ ID NO: 11651 - DNA, 9 bp, Homo sapiens
cgcggggcg

SEQ ID NO: 11652 - DNA, 11 bp, Homo sapiens
cgatgcgctcg

SEQ ID NO: 11653 - DNA, 30 bp, Homo sapiens; identical to SEQ ID NO: 8761

SEQ ID NO: 11654 - DNA, 10 bp, Homo sapiens
cgcgggagcg

SEQ ID NO: 11655 - DNA, 56 bp, Homo sapiens; identical to SEQ ID NO: 8763

SEQ ID NO: 11656 - DNA, 98 bp, Homo sapiens; identical to SEQ ID NO: 8764

SEQ ID NO: 11657 - DNA, 33 bp, Homo sapiens; identical to SEQ ID NO: 8765

SEQ ID NO: 11658 - DNA, 48 bp, Homo sapiens; identical to SEQ ID NO: 8766

SEQ ID NO: 11659 - DNA, 42 bp, Homo sapiens; identical to SEQ ID NO: 8775

SEQ ID NO: 11660 - DNA, 40 bp, Homo sapiens; identical to SEQ ID NO: 8786

SEQ ID NO: 11661 - DNA, 2 bp, Homo sapiens
cg

SEQ ID NO: 11662 - DNA, 42 bp, Homo sapiens; identical to SEQ ID NO: 8808

SEQ ID NO: 11663 - DNA, 20 bp, Artificial Sequence
  Description of Artificial Sequence: Synthetic oligonucleotide
ygtggtgygygyggygggyg

SEQ ID NO: 11664 - DNA, 116 bp, Artificial Sequence; identical to SEQ ID NO: 8820
  Description of Artificial Sequence: Synthetic polynucleotide

SEQ ID NO: 11665 - DNA, 44 bp, Artificial Sequence; identical to SEQ ID NO: 8831
  Description of Artificial Sequence: Synthetic oligonucleotide

SEQ ID NO: 11666 - DNA, 34 bp, Artificial Sequence; identical to SEQ ID NO: 8842
  Description of Artificial Sequence: Synthetic oligonucleotide

SEQ ID NO: 11667 - DNA, 211 bp, Artificial Sequence; identical to SEQ ID NO: 8853
  Description of Artificial Sequence: Synthetic polynucleotide

SEQ ID NO: 11668 - DNA, 95 bp, Artificial Sequence; identical to SEQ ID NO: 8864
  Description of Artificial Sequence: Synthetic oligonucleotide

SEQ ID NO: 11669 - DNA, 264 bp, Artificial Sequence; identical to SEQ ID NO: 8875
  Description of Artificial Sequence: Synthetic polynucleotide

SEQ ID NO: 11670 - DNA, 59 bp, Artificial Sequence; identical to SEQ ID NO: 8886
  Description of Artificial Sequence: Synthetic oligonucleotide

SEQ ID NO: 11671 - DNA, 4 bp, Artificial Sequence
  Description of Artificial Sequence: Synthetic oligonucleotide
ygyg

SEQ ID NO: 11672 - DNA, 324 bp, Artificial Sequence; identical to SEQ ID NO: 8908
  Description of Artificial Sequence: Synthetic polynucleotide

SEQ ID NO: 11673 - DNA, 102 bp, Artificial Sequence; identical to SEQ ID NO: 8916
  Description of Artificial Sequence: Synthetic polynucleotide

SEQ ID NO: 11674 - DNA, 24 bp, Artificial Sequence
  Description of Artificial Sequence: Synthetic oligonucleotide
ygtaaygattygttgtygtttayg

SEQ ID NO: 11675 - DNA, 521 bp, Artificial Sequence; identical to SEQ ID NO: 8918
  Description of Artificial Sequence: Synthetic polynucleotide

SEQ ID NO: 11676 - DNA, 1484 bp, Artificial Sequence; identical to SEQ ID NO: 8919
  Description of Artificial Sequence: Synthetic polynucleotide

SEQ ID NO: 11677 - DNA, 34 bp, Artificial Sequence; identical to SEQ ID NO: 8920
  Description of Artificial Sequence: Synthetic oligonucleotide

SEQ ID NO: 11678 - DNA, 14 bp, Artificial Sequence
  Description of Artificial Sequence: Synthetic oligonucleotide
yggygaggggttyg

SEQ ID NO: 11679 - DNA, 37 bp, Artificial Sequence; identical to SEQ ID NO: 8922
  Description of Artificial Sequence: Synthetic oligonucleotide

SEQ ID NO: 11680 - DNA, 34 bp, Artificial Sequence; identical to SEQ ID NO: 8923
  Description of Artificial Sequence: Synthetic oligonucleotide

SEQ ID NO: 11681 - DNA, 538 bp, Artificial Sequence; identical to SEQ ID NO: 8924
  Description of Artificial Sequence: Synthetic polynucleotide

SEQ ID NO: 11682 - DNA, 109 bp, Artificial Sequence; identical to SEQ ID NO: 8925
  Description of Artificial Sequence: Synthetic polynucleotide

SEQ ID NO: 11683 - DNA, 901 bp, Artificial Sequence; identical to SEQ ID NO: 8926
  Description of Artificial Sequence: Synthetic polynucleotide

SEQ ID NO: 11684 - DNA, 15 bp, Artificial Sequence
  Description of Artificial Sequence: Synthetic oligonucleotide
ygggyggygygggyg

SEQ ID NO: 11685 - DNA, 383 bp, Artificial Sequence; identical to SEQ ID NO: 8928
  Description of Artificial Sequence: Synthetic polynucleotide

SEQ ID NO: 11686 - DNA, 4 bp, Artificial Sequence
  Description of Artificial Sequence: Synthetic oligonucleotide
ygyg

SEQ ID NO: 11687 - DNA, 624 bp, Artificial Sequence; identical to SEQ ID NO: 8930
  Description of Artificial Sequence: Synthetic polynucleotide

SEQ ID NO: 11688 - DNA, 94 bp, Artificial Sequence; identical to SEQ ID NO: 8931
  Description of Artificial Sequence: Synthetic oligonucleotide

SEQ ID NO: 11689 - DNA, 63 bp, Artificial Sequence; identical to SEQ ID NO: 8932
  Description of Artificial Sequence: Synthetic oligonucleotide

SEQ ID NO: 11690 - DNA, 41 bp, Artificial Sequence; identical to SEQ ID NO: 8933
  Description of Artificial Sequence: Synthetic oligonucleotide

SEQ ID NO: 11691 - DNA, 1041 bp, Artificial Sequence; identical to SEQ ID NO: 8934
  Description of Artificial Sequence: Synthetic polynucleotide

SEQ ID NO: 11692 - DNA, 23 bp, Artificial Sequence
  Description of Artificial Sequence: Synthetic oligonucleotide
ygttttyggttygggttatggyg

SEQ ID NO: 11693 - DNA, 515 bp, Artificial Sequence; identical to SEQ ID NO: 8936
  Description of Artificial Sequence: Synthetic polynucleotide

SEQ ID NO: 11694 - DNA, 1017 bp, Artificial Sequence; identical to SEQ ID NO: 8937
  Description of Artificial Sequence: Synthetic polynucleotide

SEQ ID NO: 11695 - DNA, 8 bp, Artificial Sequence
  Description of Artificial Sequence: Synthetic oligonucleotide
ygygttyg

SEQ ID NO: 11696 - DNA, 54 bp, Artificial Sequence; identical to SEQ ID NO: 8939
  Description of Artificial Sequence: Synthetic oligonucleotide

SEQ ID NO: 11697 - DNA, 10 bp, Artificial Sequence
  Description of Artificial Sequence: Synthetic oligonucleotide
ygygttgtyg

SEQ ID NO: 11698 - DNA, 26 bp, Artificial Sequence
  Description of Artificial Sequence: Synthetic oligonucleotide
ygggtaggttygattaggyggtygyg

SEQ ID NO: 11699 - DNA, 934 bp, Artificial Sequence; identical to SEQ ID NO: 8942
  Description of Artificial Sequence: Synthetic polynucleotide

SEQ ID NO: 11700 - DNA, 279 bp, Artificial Sequence; identical to SEQ ID NO: 8943
  Description of Artificial Sequence: Synthetic polynucleotide

SEQ ID NO: 11701 - DNA, 2 bp, Artificial Sequence
  Description of Artificial Sequence: Synthetic oligonucleotide
yg

SEQ ID NO: 11702 - DNA, 9 bp, Artificial Sequence
  Description of Artificial Sequence: Synthetic oligonucleotide
ygtttygyg

SEQ ID NO: 11703 - DNA, 11 bp, Artificial Sequence
  Description of Artificial Sequence: Synthetic oligonucleotide
ygagygtatyg

SEQ ID NO: 11704 - DNA, 30 bp, Artificial Sequence; identical to SEQ ID NO: 8947
  Description of Artificial Sequence: Synthetic oligonucleotide

SEQ ID NO: 11705 - DNA, 10 bp, Artificial Sequence
  Description of Artificial Sequence: Synthetic oligonucleotide
ygttttygyg

SEQ ID NO: 11706 - DNA, 56 bp, Artificial Sequence; identical to SEQ ID NO: 8949
  Description of Artificial Sequence: Synthetic oligonucleotide

SEQ ID NO: 11707 - DNA, 98 bp, Artificial Sequence; identical to SEQ ID NO: 8950
  Description of Artificial Sequence: Synthetic oligonucleotide

SEQ ID NO: 11708 - DNA, 33 bp, Artificial Sequence; identical to SEQ ID NO: 8951
  Description of Artificial Sequence: Synthetic oligonucleotide

SEQ ID NO: 11709 - DNA, 48 bp, Artificial Sequence; identical to SEQ ID NO: 8952
  Description of Artificial Sequence: Synthetic oligonucleotide

SEQ ID NO: 11710 - DNA, 42 bp, Artificial Sequence; identical to SEQ ID NO: 8961
  Description of Artificial Sequence: Synthetic oligonucleotide

SEQ ID NO: 11711 - DNA, 40 bp, Artificial Sequence; identical to SEQ ID NO: 8972
  Description of Artificial Sequence: Synthetic oligonucleotide

SEQ ID NO: 11712 - DNA, 2 bp, Artificial Sequence
  Description of Artificial Sequence: Synthetic oligonucleotide
yg

SEQ ID NO: 11713 - DNA, 42 bp, Artificial Sequence; identical to SEQ ID NO: 8994
  Description of Artificial Sequence: Synthetic oligonucleotide

SEQ ID NO: 11714 - DNA, 20 bp, Artificial Sequence
  Description of Artificial Sequence: Synthetic oligonucleotide
cgtggtgcgcgcggcgggcg

SEQ ID NO: 11715 - DNA, 116 bp, Artificial Sequence; identical to SEQ ID NO: 9006
  Description of Artificial Sequence: Synthetic polynucleotide

SEQ ID NO: 11716 - DNA, 44 bp, Artificial Sequence; identical to SEQ ID NO: 9017
  Description of Artificial Sequence: Synthetic oligonucleotide

SEQ ID NO: 11717 - DNA, 34 bp, Artificial Sequence; identical to SEQ ID NO: 9028
  Description of Artificial Sequence: Synthetic oligonucleotide

SEQ ID NO: 11718 - DNA, 211 bp, Artificial Sequence; identical to SEQ ID NO: 9039
  Description of Artificial Sequence: Synthetic polynucleotide

SEQ ID NO: 11719 - DNA, 95 bp, Artificial Sequence; identical to SEQ ID NO: 9050
  Description of Artificial Sequence: Synthetic oligonucleotide

SEQ ID NO: 11720 - DNA, 264 bp, Artificial Sequence; identical to SEQ ID NO: 9061
  Description of Artificial Sequence: Synthetic polynucleotide

SEQ ID NO: 11721 - DNA, 59 bp, Artificial Sequence; identical to SEQ ID NO: 9072
  Description of Artificial Sequence: Synthetic oligonucleotide

SEQ ID NO: 11722 - DNA, 4 bp, Artificial Sequence
  Description of Artificial Sequence: Synthetic oligonucleotide
cgcg

SEQ ID NO: 11723 - DNA, 324 bp, Artificial Sequence; identical to SEQ ID NO: 9094
  Description of Artificial Sequence: Synthetic polynucleotide

SEQ ID NO: 11724 - DNA, 102 bp, Artificial Sequence; identical to SEQ ID NO: 9102
  Description of Artificial Sequence: Synthetic polynucleotide

SEQ ID NO: 11725 - DNA, 24 bp, Artificial Sequence
  Description of Artificial Sequence: Synthetic oligonucleotide
cgtaacgattcgttgtcgtttacg

SEQ ID NO: 11726 - DNA, 521 bp, Artificial Sequence; identical to SEQ ID NO: 9104
  Description of Artificial Sequence: Synthetic polynucleotide

SEQ ID NO: 11727 - DNA, 1484 bp, Artificial Sequence; identical to SEQ ID NO: 9105
  Description of Artificial Sequence: Synthetic polynucleotide

SEQ ID NO: 11728 - DNA, 34 bp, Artificial Sequence; identical to SEQ ID NO: 9106
  Description of Artificial Sequence: Synthetic oligonucleotide

SEQ ID NO: 11729 - DNA, 14 bp, Artificial Sequence
  Description of Artificial Sequence: Synthetic oligonucleotide
cggcgaggggttcg

SEQ ID NO: 11730 - DNA, 37 bp, Artificial Sequence; identical to SEQ ID NO: 9108
  Description of Artificial Sequence: Synthetic oligonucleotide

SEQ ID NO: 11731 - DNA, 34 bp, Artificial Sequence; identical to SEQ ID NO: 9109
  Description of Artificial Sequence: Synthetic oligonucleotide

SEQ ID NO: 11732 - DNA, 538 bp, Artificial Sequence; identical to SEQ ID NO: 9110
  Description of Artificial Sequence: Synthetic polynucleotide

SEQ ID NO: 11733 - DNA, 109 bp, Artificial Sequence; identical to SEQ ID NO: 9111
  Description of Artificial Sequence: Synthetic polynucleotide

SEQ ID NO: 11734 - DNA, 901 bp, Artificial Sequence; identical to SEQ ID NO: 9112
  Description of Artificial Sequence: Synthetic polynucleotide

SEQ ID NO: 11735 - DNA, 15 bp, Artificial Sequence
  Description of Artificial Sequence: Synthetic oligonucleotide
cgggcggcgcgggcg

SEQ ID NO: 11736 - DNA, 383 bp, Artificial Sequence; identical to SEQ ID NO: 9114
  Description of Artificial Sequence: Synthetic polynucleotide

SEQ ID NO: 11737 - DNA, 4 bp, Artificial Sequence
  Description of Artificial Sequence: Synthetic oligonucleotide
cgcg

SEQ ID NO: 11738 - DNA, 624 bp, Artificial Sequence; identical to SEQ ID NO: 9116
  Description of Artificial Sequence: Synthetic polynucleotide

SEQ ID NO: 11739 - DNA, 94 bp, Artificial Sequence; identical to SEQ ID NO: 9117
  Description of Artificial Sequence: Synthetic oligonucleotide

SEQ ID NO: 11740 - DNA, 63 bp, Artificial Sequence; identical to SEQ ID NO: 9118
  Description of Artificial Sequence: Synthetic oligonucleotide

SEQ ID NO: 11741 - DNA, 41 bp, Artificial Sequence; identical to SEQ ID NO: 9119
  Description of Artificial Sequence: Synthetic oligonucleotide

SEQ ID NO: 11742 - DNA, 1041 bp, Artificial Sequence; identical to SEQ ID NO: 9120
  Description of Artificial Sequence: Synthetic polynucleotide

SEQ ID NO: 11743 - DNA, 23 bp, Artificial Sequence
  Description of Artificial Sequence: Synthetic oligonucleotide
cgttttcggttcgggttatggcg

SEQ ID NO: 11744 - DNA, 515 bp, Artificial Sequence; identical to SEQ ID NO: 9122
  Description of Artificial Sequence: Synthetic polynucleotide

SEQ ID NO: 11745 - DNA, 1017 bp, Artificial Sequence; identical to SEQ ID NO: 9123
  Description of Artificial Sequence: Synthetic polynucleotide

SEQ ID NO: 11746 - DNA, 8 bp, Artificial Sequence
  Description of Artificial Sequence: Synthetic oligonucleotide
cgcgttcg

SEQ ID NO: 11747 - DNA, 54 bp, Artificial Sequence; identical to SEQ ID NO: 9125
  Description of Artificial Sequence: Synthetic oligonucleotide

SEQ ID NO: 11748 - DNA, 10 bp, Artificial Sequence
  Description of Artificial Sequence: Synthetic oligonucleotide
cgcgttgtcg

SEQ ID NO: 11749 - DNA, 26 bp, Artificial Sequence
  Description of Artificial Sequence: Synthetic oligonucleotide
cgggtaggttcgattaggcggtcgcg

SEQ ID NO: 11750 - DNA, 934 bp, Artificial Sequence; identical to SEQ ID NO: 9128
  Description of Artificial Sequence: Synthetic polynucleotide

SEQ ID NO: 11751 - DNA, 279 bp, Artificial Sequence; identical to SEQ ID NO: 9129
  Description of Artificial Sequence: Synthetic polynucleotide

SEQ ID NO: 11752 - DNA, 2 bp, Artificial Sequence
  Description of Artificial Sequence: Synthetic oligonucleotide
cg

SEQ ID NO: 11753 - DNA, 9 bp, Artificial Sequence
  Description of Artificial Sequence: Synthetic oligonucleotide
cgtttcgcg

SEQ ID NO: 11754 - DNA, 11 bp, Artificial Sequence
  Description of Artificial Sequence: Synthetic oligonucleotide
cgagcgtatcg

SEQ ID NO: 11755 - DNA, 30 bp, Artificial Sequence; identical to SEQ ID NO: 9133
  Description of Artificial Sequence: Synthetic oligonucleotide

SEQ ID NO: 11756 - DNA, 10 bp, Artificial Sequence
  Description of Artificial Sequence: Synthetic oligonucleotide
cgttttcgcg

SEQ ID NO: 11757 - DNA, 56 bp, Artificial Sequence; identical to SEQ ID NO: 9135
  Description of Artificial Sequence: Synthetic oligonucleotide

SEQ ID NO: 11758 - DNA, 98 bp, Artificial Sequence; identical to SEQ ID NO: 9136
  Description of Artificial Sequence: Synthetic oligonucleotide

SEQ ID NO: 11759 - DNA, 33 bp, Artificial Sequence; identical to SEQ ID NO: 9137
  Description of Artificial Sequence: Synthetic oligonucleotide

SEQ ID NO: 11760 - DNA, 48 bp, Artificial Sequence; identical to SEQ ID NO: 9138
  Description of Artificial Sequence: Synthetic oligonucleotide

SEQ ID NO: 11761 - DNA, 42 bp, Artificial Sequence; identical to SEQ ID NO: 9147
  Description of Artificial Sequence: Synthetic oligonucleotide

SEQ ID NO: 11762 - DNA, 40 bp, Artificial Sequence; identical to SEQ ID NO: 9158
  Description of Artificial Sequence: Synthetic oligonucleotide

SEQ ID NO: 11763 - DNA, 2 bp, Artificial Sequence
  Description of Artificial Sequence: Synthetic oligonucleotide
cg

SEQ ID NO: 11764 - DNA, 42 bp, Artificial Sequence; identical to SEQ ID NO: 9180
  Description of Artificial Sequence: Synthetic oligonucleotide

SEQ ID NO: 11765 - DNA, 20 bp, Artificial Sequence
  Description of Artificial Sequence: Synthetic oligonucleotide
ygttygtygygygtattayg

SEQ ID NO: 11766 - DNA, 116 bp, Artificial Sequence; identical to SEQ ID NO: 9192
  Description of Artificial Sequence: Synthetic polynucleotide

SEQ ID NO: 11767 - DNA, 44 bp, Artificial Sequence; identical to SEQ ID NO: 9203
  Description of Artificial Sequence: Synthetic oligonucleotide

SEQ ID NO: 11768 - DNA, 34 bp, Artificial Sequence; identical to SEQ ID NO: 9214
  Description of Artificial Sequence: Synthetic oligonucleotide

SEQ ID NO: 11769 - DNA, 211 bp, Artificial Sequence; identical to SEQ ID NO: 9225
  Description of Artificial Sequence: Synthetic polynucleotide

SEQ ID NO: 11770 - DNA, 95 bp, Artificial Sequence; identical to SEQ ID NO: 9236
  Description of Artificial Sequence: Synthetic oligonucleotide

SEQ ID NO: 11771 - DNA, 264 bp, Artificial Sequence; identical to SEQ ID NO: 9247
  Description of Artificial Sequence: Synthetic polynucleotide

SEQ ID NO: 11772 - DNA, 59 bp, Artificial Sequence; identical to SEQ ID NO: 9258
  Description of Artificial Sequence: Synthetic oligonucleotide

SEQ ID NO: 11773 - DNA, 4 bp, Artificial Sequence
  Description of Artificial Sequence: Synthetic oligonucleotide
ygyg

SEQ ID NO: 11774 - DNA, 324 bp, Artificial Sequence; identical to SEQ ID NO: 9280
  Description of Artificial Sequence: Synthetic polynucleotide

SEQ ID NO: 11775 - DNA, 102 bp, Artificial Sequence; identical to SEQ ID NO: 9288
  Description of Artificial Sequence: Synthetic polynucleotide

SEQ ID NO: 11776 - DNA, 24 bp, Artificial Sequence
  Description of Artificial Sequence: Synthetic oligonucleotide
ygtgggyggtagygagtygttgyg

SEQ ID NO: 11777 - DNA, 521 bp, Artificial Sequence; identical to SEQ ID NO: 9290
  Description of Artificial Sequence: Synthetic polynucleotide

SEQ ID NO: 11778 - DNA, 1484 bp, Artificial Sequence; identical to SEQ ID NO: 9291
  Description of Artificial Sequence: Synthetic polynucleotide

SEQ ID NO: 11779 - DNA, 34 bp, Artificial Sequence; identical to SEQ ID NO: 9292
  Description of Artificial Sequence: Synthetic oligonucleotide

SEQ ID NO: 11780 - DNA, 14 bp, Artificial Sequence
  Description of Artificial Sequence: Synthetic oligonucleotide
ygagtttttygtyg

SEQ ID NO: 11781 - DNA, 37 bp, Artificial Sequence; identical to SEQ ID NO: 9294
  Description of Artificial Sequence: Synthetic oligonucleotide

SEQ ID NO: 11782 - DNA, 34 bp, Artificial Sequence; identical to SEQ ID NO: 9295
  Description of Artificial Sequence: Synthetic oligonucleotide

SEQ ID NO: 11783 - DNA, 538 bp, Artificial Sequence; identical to SEQ ID NO: 9296
  Description of Artificial Sequence: Synthetic polynucleotide

SEQ ID NO: 11784 - DNA, 109 bp, Artificial Sequence; identical to SEQ ID NO: 9297
  Description of Artificial Sequence: Synthetic polynucleotide

SEQ ID NO: 11785 - DNA, 901 bp, Artificial Sequence; identical to SEQ ID NO: 9298
  Description of Artificial Sequence: Synthetic polynucleotide

SEQ ID NO: 11786 - DNA, 15 bp, Artificial Sequence
  Description of Artificial Sequence: Synthetic oligonucleotide
ygttygygtygttyg

SEQ ID NO: 11787 - DNA, 383 bp, Artificial Sequence; identical to SEQ ID NO: 9300
  Description of Artificial Sequence: Synthetic polynucleotide

SEQ ID NO: 11788 - DNA, 4 bp, Artificial Sequence
  Description of Artificial Sequence: Synthetic oligonucleotide
ygyg

SEQ ID NO: 11789 - DNA, 624 bp, Artificial Sequence; identical to SEQ ID NO: 9302
  Description of Artificial Sequence: Synthetic polynucleotide

SEQ ID NO: 11790 - DNA, 94 bp, Artificial Sequence; identical to SEQ ID NO: 9303
  Description of Artificial Sequence: Synthetic oligonucleotide

SEQ ID NO: 11791 - DNA, 63 bp, Artificial Sequence; identical to SEQ ID NO: 9304
  Description of Artificial Sequence: Synthetic oligonucleotide

SEQ ID NO: 11792 - DNA, 41 bp, Artificial Sequence; identical to SEQ ID NO: 9305
  Description of Artificial Sequence: Synthetic oligonucleotide

SEQ ID NO: 11793 - DNA, 1041 bp, Artificial Sequence; identical to SEQ ID NO: 9306
  Description of Artificial Sequence: Synthetic polynucleotide

SEQ ID NO: 11794 - DNA, 23 bp, Artificial Sequence
  Description of Artificial Sequence: Synthetic oligonucleotide
ygttatggttygagtygaaggyg

SEQ ID NO: 11795 - DNA, 515 bp, Artificial Sequence; identical to SEQ ID NO: 9308
  Description of Artificial Sequence: Synthetic polynucleotide

SEQ ID NO: 11796 - DNA, 1017 bp, Artificial Sequence; identical to SEQ ID NO: 9309
  Description of Artificial Sequence: Synthetic polynucleotide

SEQ ID NO: 11797 - DNA, 8 bp, Artificial Sequence
  Description of Artificial Sequence: Synthetic oligonucleotide
ygagygyg

SEQ ID NO: 11798 - DNA, 54 bp, Artificial Sequence; identical to SEQ ID NO: 9311
  Description of Artificial Sequence: Synthetic oligonucleotide

SEQ ID NO: 11799 - DNA, 10 bp, Artificial Sequence
  Description of Artificial Sequence: Synthetic oligonucleotide
ygataaygyg

SEQ ID NO: 11800 - DNA, 26 bp, Artificial Sequence
  Description of Artificial Sequence: Synthetic oligonucleotide
ygyggtygtttggtygaatttgttyg

SEQ ID NO: 11801 - DNA, 934 bp, Artificial Sequence; identical to SEQ ID NO: 9314
  Description of Artificial Sequence: Synthetic polynucleotide

SEQ ID NO: 11802 - DNA, 279 bp, Artificial Sequence; identical to SEQ ID NO: 9315
  Description of Artificial Sequence: Synthetic polynucleotide

SEQ ID NO: 11803 - DNA, 2 bp, Artificial Sequence
  Description of Artificial Sequence: Synthetic oligonucleotide
yg

SEQ ID NO: 11804 - DNA, 9 bp, Artificial Sequence
  Description of Artificial Sequence: Synthetic oligonucleotide
ygyggggyg

SEQ ID NO: 11805 - DNA, 11 bp, Artificial Sequence
  Description of Artificial Sequence: Synthetic oligonucleotide
ygatgygttyg

SEQ ID NO: 11806 - DNA, 30 bp, Artificial Sequence; identical to SEQ ID NO: 9319
  Description of Artificial Sequence: Synthetic oligonucleotide

SEQ ID NO: 11807 - DNA, 10 bp, Artificial Sequence
  Description of Artificial Sequence: Synthetic oligonucleotide
ygygggagyg

SEQ ID NO: 11808 - DNA, 56 bp, Artificial Sequence; identical to SEQ ID NO: 9321
  Description of Artificial Sequence: Synthetic oligonucleotide

SEQ ID NO: 11809 - DNA, 98 bp, Artificial Sequence; identical to SEQ ID NO: 9322
  Description of Artificial Sequence: Synthetic oligonucleotide

SEQ ID NO: 11810 - DNA, 33 bp, Artificial Sequence; identical to SEQ ID NO: 9323
  Description of Artificial Sequence: Synthetic oligonucleotide

SEQ ID NO: 11811 - DNA, 48 bp, Artificial Sequence; identical to SEQ ID NO: 9324
  Description of Artificial Sequence: Synthetic oligonucleotide

SEQ ID NO: 11812 - DNA, 42 bp, Artificial Sequence; identical to SEQ ID NO: 9333
  Description of Artificial Sequence: Synthetic oligonucleotide

SEQ ID NO: 11813 - DNA, 40 bp, Artificial Sequence; identical to SEQ ID NO: 9344
  Description of Artificial Sequence: Synthetic oligonucleotide

SEQ ID NO: 11814 - DNA, 2 bp, Artificial Sequence
  Description of Artificial Sequence: Synthetic oligonucleotide
yg

SEQ ID NO: 11815 - DNA, 42 bp, Artificial Sequence; identical to SEQ ID NO: 9366
  Description of Artificial Sequence: Synthetic oligonucleotide

SEQ ID NO: 11816 - DNA, 20 bp, Artificial Sequence
  Description of Artificial Sequence: Synthetic oligonucleotide
cgttcgtcgcgcgtattacg

SEQ ID NO: 11817 - DNA, 116 bp, Artificial Sequence; identical to SEQ ID NO: 9378
  Description of Artificial Sequence: Synthetic polynucleotide

SEQ ID NO: 11818 - DNA, 44 bp, Artificial Sequence; identical to SEQ ID NO: 9389
  Description of Artificial Sequence: Synthetic oligonucleotide

SEQ ID NO: 11819 - DNA, 34 bp, Artificial Sequence; identical to SEQ ID NO: 9400
  Description of Artificial Sequence: Synthetic oligonucleotide

SEQ ID NO: 11820 - DNA, 211 bp, Artificial Sequence; identical to SEQ ID NO: 9411
  Description of Artificial Sequence: Synthetic polynucleotide

SEQ ID NO: 11821 - DNA, 95 bp, Artificial Sequence; identical to SEQ ID NO: 9422
  Description of Artificial Sequence: Synthetic oligonucleotide

SEQ ID NO: 11822 - DNA, 264 bp, Artificial Sequence; identical to SEQ ID NO: 9433
  Description of Artificial Sequence: Synthetic polynucleotide

SEQ ID NO: 11823 - DNA, 59 bp, Artificial Sequence; identical to SEQ ID NO: 9444
  Description of Artificial Sequence: Synthetic oligonucleotide

SEQ ID NO: 11824 - DNA, 4 bp, Artificial Sequence
  Description of Artificial Sequence: Synthetic oligonucleotide
cgcg

SEQ ID NO: 11825 - DNA, 324 bp, Artificial Sequence; identical to SEQ ID NO: 9466
  Description of Artificial Sequence: Synthetic polynucleotide

SEQ ID NO: 11826 - DNA, 102 bp, Artificial Sequence; identical to SEQ ID NO: 9474
  Description of Artificial Sequence: Synthetic polynucleotide

SEQ ID NO: 11827 - DNA, 24 bp, Artificial Sequence
  Description of Artificial Sequence: Synthetic oligonucleotide
cgtgggcggtagcgagtcgttgcg

SEQ ID NO: 11828 - DNA, 521 bp, Artificial Sequence; identical to SEQ ID NO: 9476
  Description of Artificial Sequence: Synthetic polynucleotide

SEQ ID NO: 11829 - DNA, 1484 bp, Artificial Sequence; identical to SEQ ID NO: 9477
  Description of Artificial Sequence: Synthetic polynucleotide

SEQ ID NO: 11830 - DNA, 34 bp, Artificial Sequence; identical to SEQ ID NO: 8734
  Description of Artificial Sequence: Synthetic oligonucleotide

SEQ ID NO: 11831 - DNA, 14 bp, Artificial Sequence
  Description of Artificial Sequence: Synthetic oligonucleotide
cgagtttttcgtcg

SEQ ID NO: 11832 - DNA, 37 bp, Artificial Sequence; identical to SEQ ID NO: 9480
  Description of Artificial Sequence: Synthetic oligonucleotide

SEQ ID NO: 11833 - DNA, 34 bp, Artificial Sequence; identical to SEQ ID NO: 9481
  Description of Artificial Sequence: Synthetic oligonucleotide

SEQ ID NO: 11834 - DNA, 538 bp, Artificial Sequence; identical to SEQ ID NO: 9482
  Description of Artificial Sequence: Synthetic polynucleotide

SEQ ID NO: 11835 - DNA, 109 bp, Artificial Sequence; identical to SEQ ID NO: 9483
  Description of Artificial Sequence: Synthetic polynucleotide

SEQ ID NO: 11836 - DNA, 901 bp, Artificial Sequence; identical to SEQ ID NO: 9484
  Description of Artificial Sequence: Synthetic polynucleotide

SEQ ID NO: 11837 - DNA, 15 bp, Artificial Sequence
  Description of Artificial Sequence: Synthetic oligonucleotide
cgttcgcgtcgttcg

SEQ ID NO: 11838 - DNA, 383 bp, Artificial Sequence; identical to SEQ ID NO: 9486
  Description of Artificial Sequence: Synthetic polynucleotide

SEQ ID NO: 11839 - DNA, 4 bp, Artificial Sequence
  Description of Artificial Sequence: Synthetic oligonucleotide
cgcg

SEQ ID NO: 11840 - DNA, 624 bp, Artificial Sequence; identical to SEQ ID NO: 9488
  Description of Artificial Sequence: Synthetic polynucleotide

SEQ ID NO: 11841 - DNA, 94 bp, Artificial Sequence; identical to SEQ ID NO: 9489
  Description of Artificial Sequence: Synthetic oligonucleotide

SEQ ID NO: 11842 - DNA, 63 bp, Artificial Sequence; identical to SEQ ID NO: 9490
  Description of Artificial Sequence: Synthetic oligonucleotide

SEQ ID NO: 11843 - DNA, 41 bp, Artificial Sequence; identical to SEQ ID NO: 9491
  Description of Artificial Sequence: Synthetic oligonucleotide

SEQ ID NO: 11844 - DNA, 1041 bp, Artificial Sequence; identical to SEQ ID NO: 9492
  Description of Artificial Sequence: Synthetic polynucleotide

SEQ ID NO: 11845 - DNA, 23 bp, Artificial Sequence
  Description of Artificial Sequence: Synthetic oligonucleotide
cgttatggttcgagtcgaaggcg

SEQ ID NO: 11846 - DNA, 515 bp, Artificial Sequence; identical to SEQ ID NO: 9494
  Description of Artificial Sequence: Synthetic polynucleotide

SEQ ID NO: 11847 - DNA, 1017 bp, Artificial Sequence; identical to SEQ ID NO: 9495
  Description of Artificial Sequence: Synthetic polynucleotide

SEQ ID NO: 11848 - DNA, 8 bp, Artificial Sequence
  Description of Artificial Sequence: Synthetic oligonucleotide
cgagcgcg

SEQ ID NO: 11849 - DNA, 54 bp, Artificial Sequence; identical to SEQ ID NO: 9497
  Description of Artificial Sequence: Synthetic oligonucleotide

SEQ ID NO: 11850 - DNA, 10 bp, Artificial Sequence
  Description of Artificial Sequence: Synthetic oligonucleotide
cgataacgcg

SEQ ID NO: 11851 - DNA, 26 bp, Artificial Sequence
  Description of Artificial Sequence: Synthetic oligonucleotide
cgcggtcgtttggtcgaatttgttcg

SEQ ID NO: 11852 - DNA, 934 bp, Artificial Sequence; identical to SEQ ID NO: 9500
  Description of Artificial Sequence: Synthetic polynucleotide

SEQ ID NO: 11853 - DNA, 279 bp, Artificial Sequence; identical to SEQ ID NO: 9501
  Description of Artificial Sequence: Synthetic polynucleotide

SEQ ID NO: 11854 - DNA, 2 bp, Artificial Sequence
  Description of Artificial Sequence: Synthetic oligonucleotide
cg

SEQ ID NO: 11855 - DNA, 9 bp, Artificial Sequence
  Description of Artificial Sequence: Synthetic oligonucleotide
cgcggggcg

SEQ ID NO: 11856 - DNA, 11 bp, Artificial Sequence
  Description of Artificial Sequence: Synthetic oligonucleotide
cgatgcgttcg

SEQ ID NO: 11857 - DNA, 30 bp, Artificial Sequence; identical to SEQ ID NO: 9505
  Description of Artificial Sequence: Synthetic oligonucleotide

SEQ ID NO: 11858 - DNA, 10 bp, Artificial Sequence
  Description of Artificial Sequence: Synthetic oligonucleotide
cgcgggagcg

SEQ ID NO: 11859 - DNA, 56 bp, Artificial Sequence; identical to SEQ ID NO: 9507
  Description of Artificial Sequence: Synthetic oligonucleotide

SEQ ID NO: 11860 - DNA, 98 bp, Artificial Sequence; identical to SEQ ID NO: 9508
  Description of Artificial Sequence: Synthetic oligonucleotide

SEQ ID NO: 11861 - DNA, 33 bp, Artificial Sequence; identical to SEQ ID NO: 9509
  Description of Artificial Sequence: Synthetic oligonucleotide

SEQ ID NO: 11862 - DNA, 48 bp, Artificial Sequence; identical to SEQ ID NO: 8766
  Description of Artificial Sequence: Synthetic oligonucleotide

SEQ ID NO: 11863 - DNA, 42 bp, Artificial Sequence; identical to SEQ ID NO: 9519
  Description of Artificial Sequence: Synthetic oligonucleotide

SEQ ID NO: 11864 - DNA, 40 bp, Artificial Sequence; identical to SEQ ID NO: 9530
  Description of Artificial Sequence: Synthetic oligonucleotide

SEQ ID NO: 11865 - DNA, 2 bp, Artificial Sequence
  Description of Artificial Sequence: Synthetic oligonucleotide
cg

SEQ ID NO: 11866 - DNA, 42 bp, Artificial Sequence; identical to SEQ ID NO: 9552
  Description of Artificial Sequence: Synthetic oligonucleotide

SEQ ID NO: 11867 - DNA, 219 bp, Homo sapiens; identical to SEQ ID NO: 9563

SEQ ID NO: 11868 - DNA, 315 bp, Homo sapiens; identical to SEQ ID NO: 9564

SEQ ID NO: 11869 - DNA, 243 bp, Homo sapiens; identical to SEQ ID NO: 9575

SEQ ID NO: 11870 - DNA, 233 bp, Homo sapiens; identical to SEQ ID NO: 9586

SEQ ID NO: 11871 - DNA, 410 bp, Homo sapiens; identical to SEQ ID NO: 9597

SEQ ID NO: 11872 - DNA, 294 bp, Homo sapiens; identical to SEQ ID NO: 9608

SEQ ID NO: 11873 - DNA, 463 bp, Homo sapiens; identical to SEQ ID NO: 9619

SEQ ID NO: 11874 - DNA, 258 bp, Homo sapiens; identical to SEQ ID NO: 9630

SEQ ID NO: 11875 - DNA, 203 bp, Homo sapiens; identical to SEQ ID NO: 9641

SEQ ID NO: 11876 - DNA, 523 bp, Homo sapiens; identical to SEQ ID NO: 9652

SEQ ID NO: 11877 - DNA, 301 bp, Homo sapiens; identical to SEQ ID NO: 9660

SEQ ID NO: 11878 - DNA, 223 bp, Homo sapiens; identical to SEQ ID NO: 9661

SEQ ID NO: 11879 - DNA, 720 bp, Homo sapiens; identical to SEQ ID NO: 9662

SEQ ID NO: 11880 - DNA, 1683 bp, Homo sapiens; identical to SEQ ID NO: 9663

SEQ ID NO: 11881 - DNA, 233 bp, Homo sapiens; identical to SEQ ID NO: 9664

SEQ ID NO: 11882 - DNA, 213 bp, Homo sapiens; identical to SEQ ID NO: 9665

SEQ ID NO: 11883 - DNA, 236 bp, Homo sapiens; identical to SEQ ID NO: 9666

SEQ ID NO: 11884 - DNA, 233 bp, Homo sapiens; identical to SEQ ID NO: 9667

SEQ ID NO: 11885 - DNA, 737 bp, Homo sapiens; identical to SEQ ID NO: 9668

SEQ ID NO: 11886 - DNA, 308 bp, Homo sapiens; identical to SEQ ID NO: 9669

SEQ ID NO: 11887 - DNA, 1100 bp, Homo sapiens; identical to SEQ ID NO: 9670

SEQ ID NO: 11888 - DNA, 214 bp, Homo sapiens; identical to SEQ ID NO: 9671

SEQ ID NO: 11889 - DNA, 582 bp, Homo sapiens; identical to SEQ ID NO: 9672

SEQ ID NO: 11890 - DNA, 203 bp, Homo sapiens; identical to SEQ ID NO: 9673

SEQ ID NO: 11891 - DNA, 823 bp, Homo sapiens; identical to SEQ ID NO: 9674

SEQ ID NO: 11892 - DNA, 293 bp, Homo sapiens; identical to SEQ ID NO: 9675

SEQ ID NO: 11893 - DNA, 262 bp, Homo sapiens; identical to SEQ ID NO: 9676

SEQ ID NO: 11894 - DNA, 240 bp, Homo sapiens; identical to SEQ ID NO: 9677

SEQ ID NO: 11895 - DNA, 1240 bp, Homo sapiens; identical to SEQ ID NO: 9678

SEQ ID NO: 11896 - DNA, 222 bp, Homo sapiens; identical to SEQ ID NO: 9679

SEQ ID NO: 11897 - DNA, 714 bp, Homo sapiens; identical to SEQ ID NO: 9680

SEQ ID NO: 11898 - DNA, 1216 bp, Homo sapiens; identical to SEQ ID NO: 9681

SEQ ID NO: 11899 - DNA, 207 bp, Homo sapiens; identical to SEQ ID NO: 9682

SEQ ID NO: 11900 - DNA, 253 bp, Homo sapiens; identical to SEQ ID NO: 9683

SEQ ID NO: 11901 - DNA, 209 bp, Homo sapiens; identical to SEQ ID NO: 9684

SEQ ID NO: 11902 - DNA, 225 bp, Homo sapiens; identical to SEQ ID NO: 9685

SEQ ID NO: 11903 - DNA, 1133 bp, Homo sapiens; identical to SEQ ID NO: 9686

SEQ ID NO: 11904 - DNA, 478 bp, Homo sapiens; identical to SEQ ID NO: 9687

SEQ ID NO: 11905 - DNA, 201 bp, Homo sapiens; identical to SEQ ID NO: 9688

SEQ ID NO: 11906 - DNA, 208 bp, Homo sapiens; identical to SEQ ID NO: 9689

SEQ ID NO: 11907 - DNA, 210 bp, Homo sapiens; identical to SEQ ID NO: 9690

SEQ ID NO: 11908 - DNA, 229 bp, Homo sapiens; identical to SEQ ID NO: 9691

SEQ ID NO: 11909 - DNA, 209 bp, Homo sapiens; identical to SEQ ID NO: 9692

SEQ ID NO: 11910 - DNA, 255 bp, Homo sapiens; identical to SEQ ID NO: 9693

SEQ ID NO: 11911 - DNA, 297 bp, Homo sapiens; identical to SEQ ID NO: 9694

SEQ ID NO: 11912 - DNA, 232 bp, Homo sapiens; identical to SEQ ID NO: 9695

SEQ ID NO: 11913 - DNA, 247 bp, Homo sapiens; identical to SEQ ID NO: 9696

SEQ ID NO: 11914 - DNA, 241 bp, Homo sapiens; identical to SEQ ID NO: 9705

SEQ ID NO: 11915 - DNA, 239 bp, Homo sapiens; identical to SEQ ID NO: 9716

SEQ ID NO: 11916 - DNA, 201 bp, Homo sapiens; identical to SEQ ID NO: 9727

SEQ ID NO: 11917 - DNA, 241 bp, Homo sapiens; identical to SEQ ID NO: 9738

SEQ ID NO: 11918 - DNA, 219 bp, Homo sapiens; identical to SEQ ID NO: 9749

SEQ ID NO: 11919 - DNA, 315 bp, Homo sapiens; identical to SEQ ID NO: 9750

SEQ ID NO: 11920 - DNA, 243 bp, Homo sapiens; identical to SEQ ID NO: 9761

SEQ ID NO: 11921 - DNA, 233 bp, Homo sapiens; identical to SEQ ID NO: 9772

SEQ ID NO: 11922 - DNA, 410 bp, Homo sapiens; identical to SEQ ID NO: 9783

SEQ ID NO: 11923 - DNA, 294 bp, Homo sapiens; identical to SEQ ID NO: 9794

SEQ ID NO: 11924 - DNA, 463 bp, Homo sapiens; identical to SEQ ID NO: 9805

SEQ ID NO: 11925 - DNA, 258 bp, Homo sapiens; identical to SEQ ID NO: 9816

SEQ ID NO: 11926 - DNA, 203 bp, Homo sapiens; identical to SEQ ID NO: 9827

SEQ ID NO: 11927 - DNA, 523 bp, Homo sapiens; identical to SEQ ID NO: 9838

SEQ ID NO: 11928 - DNA, 301 bp, Homo sapiens; identical to SEQ ID NO: 9846

SEQ ID NO: 11929 - DNA, 223 bp, Homo sapiens; identical to SEQ ID NO: 9847

SEQ ID NO: 11930 - DNA, 720 bp, Homo sapiens; identical to SEQ ID NO: 9848

SEQ ID NO: 11931 - DNA, 1683 bp, Homo sapiens; identical to SEQ ID NO: 9849

SEQ ID NO: 11932 - DNA, 233 bp, Homo sapiens; identical to SEQ ID NO: 9850

SEQ ID NO: 11933 - DNA, 213 bp, Homo sapiens; identical to SEQ ID NO: 9851

SEQ ID NO: 11934 - DNA, 236 bp, Homo sapiens; identical to SEQ ID NO: 9852

SEQ ID NO: 11935 - DNA, 233 bp, Homo sapiens; identical to SEQ ID NO: 9853

SEQ ID NO: 11936 - DNA, 737 bp, Homo sapiens; identical to SEQ ID NO: 9854

SEQ ID NO: 11937 - DNA, 308 bp, Homo sapiens; identical to SEQ ID NO: 9855

SEQ ID NO: 11938 - DNA, 1100 bp, Homo sapiens; identical to SEQ ID NO: 9856

SEQ ID NO: 11939 - DNA, 214 bp, Homo sapiens; identical to SEQ ID NO: 9857

SEQ ID NO: 11940 - DNA, 582 bp, Homo sapiens; identical to SEQ ID NO: 9858

SEQ ID NO: 11941 - DNA, 203 bp, Homo sapiens; identical to SEQ ID NO: 9859

SEQ ID NO: 11942 - DNA, 823 bp, Homo sapiens; identical to SEQ ID NO: 9860

SEQ ID NO: 11943 - DNA, 293 bp, Homo sapiens; identical to SEQ ID NO: 9861

SEQ ID NO: 11944 - DNA, 262 bp, Homo sapiens; identical to SEQ ID NO: 9862

SEQ ID NO: 11945 - DNA, 240 bp, Homo sapiens; identical to SEQ ID NO: 9863

SEQ ID NO: 11946 - DNA, 1240 bp, Homo sapiens; identical to SEQ ID NO: 9864

SEQ ID NO: 11947 - DNA, 222 bp, Homo sapiens; identical to SEQ ID NO: 9865

SEQ ID NO: 11948 - DNA, 714 bp, Homo sapiens; identical to SEQ ID NO: 9866

SEQ ID NO: 11949 - DNA, 1216 bp, Homo sapiens; identical to SEQ ID NO: 9867

SEQ ID NO: 11950 - DNA, 207 bp, Homo sapiens; identical to SEQ ID NO: 9868

SEQ ID NO: 11951 - DNA, 253 bp, Homo sapiens; identical to SEQ ID NO: 9869

SEQ ID NO: 11952 - DNA, 209 bp, Homo sapiens; identical to SEQ ID NO: 9870

SEQ ID NO: 11953 - DNA, 225 bp, Homo sapiens; identical to SEQ ID NO: 9871

SEQ ID NO: 11954 - DNA, 1133 bp, Homo sapiens; identical to SEQ ID NO: 9872

SEQ ID NO: 11955 - DNA, 478 bp, Homo sapiens; identical to SEQ ID NO: 9873

SEQ ID NO: 11956 - DNA, 201 bp, Homo sapiens; identical to SEQ ID NO: 9874

SEQ ID NO: 11957 - DNA, 208 bp, Homo sapiens; identical to SEQ ID NO: 9875

SEQ ID NO: 11958 - DNA, 210 bp, Homo sapiens; identical to SEQ ID NO: 9876

SEQ ID NO: 11959 - DNA, 229 bp, Homo sapiens; identical to SEQ ID NO: 9877

SEQ ID NO: 11960 - DNA, 209 bp, Homo sapiens; identical to SEQ ID NO: 9878

SEQ ID NO: 11961 - DNA, 255 bp, Homo sapiens; identical to SEQ ID NO: 9879

SEQ ID NO: 11962 - DNA, 297 bp, Homo sapiens; identical to SEQ ID NO: 9880

SEQ ID NO: 11963 - DNA, 232 bp, Homo sapiens; identical to SEQ ID NO: 9881

SEQ ID NO: 11964 - DNA, 247 bp, Homo sapiens; identical to SEQ ID NO: 9882

SEQ ID NO: 11965 - DNA, 241 bp, Homo sapiens; identical to SEQ ID NO: 9891

SEQ ID NO: 11966 - DNA, 239 bp, Homo sapiens; identical to SEQ ID NO: 9902

SEQ ID NO: 11967 - DNA, 201 bp, Homo sapiens; identical to SEQ ID NO: 9913

SEQ ID NO: 11968 - DNA, 241 bp, Homo sapiens; identical to SEQ ID NO: 9924

SEQ ID NO: 11969 - DNA, 219 bp, Artificial Sequence; identical to SEQ ID NO: 9935
  Description of Artificial Sequence: Synthetic polynucleotide

SEQ ID NO: 11970 - DNA, 315 bp, Artificial Sequence; identical to SEQ ID NO: 9936
  Description of Artificial Sequence: Synthetic polynucleotide

SEQ ID NO: 11971 - DNA, 243 bp, Artificial Sequence; identical to SEQ ID NO: 9947
  Description of Artificial Sequence: Synthetic polynucleotide

SEQ ID NO: 11972 - DNA, 233 bp, Artificial Sequence; identical to SEQ ID NO: 9958
  Description of Artificial Sequence: Synthetic polynucleotide

SEQ ID NO: 11973 - DNA, 410 bp, Artificial Sequence; identical to SEQ ID NO: 9969
  Description of Artificial Sequence: Synthetic polynucleotide

SEQ ID NO: 11974 - DNA, 294 bp, Artificial Sequence; identical to SEQ ID NO: 9980
  Description of Artificial Sequence: Synthetic polynucleotide

SEQ ID NO: 11975 - DNA, 463 bp, Artificial Sequence; identical to SEQ ID NO: 9991
  Description of Artificial Sequence: Synthetic polynucleotide

SEQ ID NO: 11976 - DNA, 258 bp, Artificial Sequence; identical to SEQ ID NO: 10002
  Description of Artificial Sequence: Synthetic polynucleotide

SEQ ID NO: 11977 - DNA, 203 bp, Artificial Sequence; identical to SEQ ID NO: 10013
  Description of Artificial Sequence: Synthetic polynucleotide

SEQ ID NO: 11978 - DNA, 523 bp, Artificial Sequence; identical to SEQ ID NO: 10024
  Description of Artificial Sequence: Synthetic polynucleotide

SEQ ID NO: 11979 - DNA, 301 bp, Artificial Sequence; identical to SEQ ID NO: 10032
  Description of Artificial Sequence: Synthetic polynucleotide

SEQ ID NO: 11980 - DNA, 223 bp, Artificial Sequence; identical to SEQ ID NO: 10033
  Description of Artificial Sequence: Synthetic polynucleotide

SEQ ID NO: 11981 - DNA, 720 bp, Artificial Sequence; identical to SEQ ID NO: 10034
  Description of Artificial Sequence: Synthetic polynucleotide

SEQ ID NO: 11982 - DNA, 1683 bp, Artificial Sequence; identical to SEQ ID NO: 10035
  Description of Artificial Sequence: Synthetic polynucleotide

SEQ ID NO: 11983 - DNA, 233 bp, Artificial Sequence; identical to SEQ ID NO: 10036
  Description of Artificial Sequence: Synthetic polynucleotide

SEQ ID NO: 11984 - DNA, 213 bp, Artificial Sequence; identical to SEQ ID NO: 10037
  Description of Artificial Sequence: Synthetic polynucleotide

SEQ ID NO: 11985 - DNA, 236 bp, Artificial Sequence; identical to SEQ ID NO: 10038
  Description of Artificial Sequence: Synthetic polynucleotide

SEQ ID NO: 11986 - DNA, 233 bp, Artificial Sequence; identical to SEQ ID NO: 10039
  Description of Artificial Sequence: Synthetic polynucleotide

SEQ ID NO: 11987 - DNA, 737 bp, Artificial Sequence; identical to SEQ ID NO: 10040
  Description of Artificial Sequence: Synthetic polynucleotide

SEQ ID NO: 11988 - DNA, 308 bp, Artificial Sequence; identical to SEQ ID NO: 10041
  Description of Artificial Sequence: Synthetic polynucleotide

SEQ ID NO: 11989 - DNA, 1100 bp, Artificial Sequence; identical to SEQ ID NO: 10042
  Description of Artificial Sequence: Synthetic polynucleotide

SEQ ID NO: 11990 - DNA, 214 bp, Artificial Sequence; identical to SEQ ID NO: 10043
  Description of Artificial Sequence: Synthetic polynucleotide

SEQ ID NO: 11991 - DNA, 582 bp, Artificial Sequence; identical to SEQ ID NO: 10044
  Description of Artificial Sequence: Synthetic polynucleotide

SEQ ID NO: 11992 - DNA, 203 bp, Artificial Sequence; identical to SEQ ID NO: 10045
  Description of Artificial Sequence: Synthetic polynucleotide

SEQ ID NO: 11993 - DNA, 823 bp, Artificial Sequence; identical to SEQ ID NO: 10046
  Description of Artificial Sequence: Synthetic polynucleotide

SEQ ID NO: 11994 - DNA, 293 bp, Artificial Sequence; identical to SEQ ID NO: 10047
  Description of Artificial Sequence: Synthetic polynucleotide

SEQ ID NO: 11995 - DNA, 262 bp, Artificial Sequence; identical to SEQ ID NO: 10048
  Description of Artificial Sequence: Synthetic polynucleotide

SEQ ID NO: 11996 - DNA, 240 bp, Artificial Sequence; identical to SEQ ID NO: 10049
  Description of Artificial Sequence: Synthetic polynucleotide

SEQ ID NO: 11997 - DNA, 1240 bp, Artificial Sequence; identical to SEQ ID NO: 10050
  Description of Artificial Sequence: Synthetic polynucleotide

SEQ ID NO: 11998 - DNA, 222 bp, Artificial Sequence; identical to SEQ ID NO: 10051
  Description of Artificial Sequence: Synthetic polynucleotide

SEQ ID NO: 11999 - DNA, 714 bp, Artificial Sequence; identical to SEQ ID NO: 10052
  Description of Artificial Sequence: Synthetic polynucleotide

SEQ ID NO: 12000 - DNA, 1216 bp, Artificial Sequence; identical to SEQ ID NO: 10053
  Description of Artificial Sequence: Synthetic polynucleotide

SEQ ID NO: 12001 - DNA, 207 bp, Artificial Sequence; identical to SEQ ID NO: 10054
  Description of Artificial Sequence: Synthetic polynucleotide

SEQ ID NO: 12002 - DNA, 253 bp, Artificial Sequence; identical to SEQ ID NO: 10055
  Description of Artificial Sequence: Synthetic polynucleotide

SEQ ID NO: 12003 - DNA, 209 bp, Artificial Sequence; identical to SEQ ID NO: 10056
  Description of Artificial Sequence: Synthetic polynucleotide

SEQ ID NO: 12004 - DNA, 225 bp, Artificial Sequence; identical to SEQ ID NO: 10057
  Description of Artificial Sequence: Synthetic polynucleotide

SEQ ID NO: 12005 - DNA, 1133 bp, Artificial Sequence; identical to SEQ ID NO: 10058
  Description of Artificial Sequence: Synthetic polynucleotide

SEQ ID NO: 12006 - DNA, 478 bp, Artificial Sequence; identical to SEQ ID NO: 10059
  Description of Artificial Sequence: Synthetic polynucleotide

SEQ ID NO: 12007 - DNA, 201 bp, Artificial Sequence; identical to SEQ ID NO: 10060
  Description of Artificial Sequence: Synthetic polynucleotide

SEQ ID NO: 12008 - DNA, 208 bp, Artificial Sequence; identical to SEQ ID NO: 10061
  Description of Artificial Sequence: Synthetic polynucleotide

SEQ ID NO: 12009 - DNA, 210 bp, Artificial Sequence; identical to SEQ ID NO: 10062
  Description of Artificial Sequence: Synthetic polynucleotide

SEQ ID NO: 12010 - DNA, 229 bp, Artificial Sequence; identical to SEQ ID NO: 10063
  Description of Artificial Sequence: Synthetic polynucleotide

SEQ ID NO: 12011 - DNA, 209 bp, Artificial Sequence; identical to SEQ ID NO: 10064
  Description of Artificial Sequence: Synthetic polynucleotide

SEQ ID NO: 12012 - DNA, 255 bp, Artificial Sequence; identical to SEQ ID NO: 10065
  Description of Artificial Sequence: Synthetic polynucleotide

SEQ ID NO: 12013 - DNA, 297 bp, Artificial Sequence; identical to SEQ ID NO: 10066
  Description of Artificial Sequence: Synthetic polynucleotide

SEQ ID NO: 12014 - DNA, 232 bp, Artificial Sequence; identical to SEQ ID NO: 10067
  Description of Artificial Sequence: Synthetic polynucleotide

SEQ ID NO: 12015 - DNA, 247 bp, Artificial Sequence; identical to SEQ ID NO: 10068
  Description of Artificial Sequence: Synthetic polynucleotide

SEQ ID NO: 12016 - DNA, 241 bp, Artificial Sequence; identical to SEQ ID NO: 10077
  Description of Artificial Sequence: Synthetic polynucleotide

SEQ ID NO: 12017 - DNA, 239 bp, Artificial Sequence; identical to SEQ ID NO: 10088
  Description of Artificial Sequence: Synthetic polynucleotide

SEQ ID NO: 12018 - DNA, 201 bp, Artificial Sequence; identical to SEQ ID NO: 10099
  Description of Artificial Sequence: Synthetic polynucleotide

SEQ ID NO: 12019 - DNA, 241 bp, Artificial Sequence; identical to SEQ ID NO: 10110
  Description of Artificial Sequence: Synthetic polynucleotide

SEQ ID NO: 12020 - DNA, 219 bp, Artificial Sequence; identical to SEQ ID NO: 10121
  Description of Artificial Sequence: Synthetic polynucleotide

SEQ ID NO: 12021 - DNA, 315 bp, Artificial Sequence; identical to SEQ ID NO: 10122
  Description of Artificial Sequence: Synthetic polynucleotide

SEQ ID NO: 12022 - DNA, 243 bp, Artificial Sequence; identical to SEQ ID NO: 10133
  Description of Artificial Sequence: Synthetic polynucleotide

SEQ ID NO: 12023 - DNA, 233 bp, Artificial Sequence; identical to SEQ ID NO: 10144
  Description of Artificial Sequence: Synthetic polynucleotide

SEQ ID NO: 12024 - DNA, 410 bp, Artificial Sequence; identical to SEQ ID NO: 10155
  Description of Artificial Sequence: Synthetic polynucleotide

SEQ ID NO: 12025 - DNA, 294 bp, Artificial Sequence; identical to SEQ ID NO: 10166
  Description of Artificial Sequence: Synthetic polynucleotide

SEQ ID NO: 12026 - DNA, 463 bp, Artificial Sequence; identical to SEQ ID NO: 10177
  Description of Artificial Sequence: Synthetic polynucleotide

SEQ ID NO: 12027 - DNA, 258 bp, Artificial Sequence; identical to SEQ ID NO: 10188
  Description of Artificial Sequence: Synthetic polynucleotide

SEQ ID NO: 12028 - DNA, 203 bp, Artificial Sequence; identical to SEQ ID NO: 10199
  Description of Artificial Sequence: Synthetic polynucleotide

SEQ ID NO: 12029 - DNA, 523 bp, Artificial Sequence; identical to SEQ ID NO: 10210
  Description of Artificial Sequence: Synthetic polynucleotide

SEQ ID NO: 12030 - DNA, 301 bp, Artificial Sequence; identical to SEQ ID NO: 10218
  Description of Artificial Sequence: Synthetic polynucleotide

SEQ ID NO: 12031 - DNA, 223 bp, Artificial Sequence; identical to SEQ ID NO: 10219
  Description of Artificial Sequence: Synthetic polynucleotide

SEQ ID NO: 12032 - DNA, 720 bp, Artificial Sequence; identical to SEQ ID NO: 10220
  Description of Artificial Sequence: Synthetic polynucleotide

SEQ ID NO: 12033 - DNA, 1683 bp, Artificial Sequence; identical to SEQ ID NO: 10221
  Description of Artificial Sequence: Synthetic polynucleotide

SEQ ID NO: 12034 - DNA, 233 bp, Artificial Sequence; identical to SEQ ID NO: 10222
  Description of Artificial Sequence: Synthetic polynucleotide

SEQ ID NO: 12035 - DNA, 213 bp, Artificial Sequence; identical to SEQ ID NO: 10223
  Description of Artificial Sequence: Synthetic polynucleotide

SEQ ID NO: 12036 - DNA, 236 bp, Artificial Sequence; identical to SEQ ID NO: 10224
  Description of Artificial Sequence: Synthetic polynucleotide

SEQ ID NO: 12037 - DNA, 233 bp, Artificial Sequence; identical to SEQ ID NO: 10225
  Description of Artificial Sequence: Synthetic polynucleotide

SEQ ID NO: 12038 - DNA, 737 bp, Artificial Sequence; identical to SEQ ID NO: 10226
  Description of Artificial Sequence: Synthetic polynucleotide

SEQ ID NO: 12039 - DNA, 308 bp, Artificial Sequence; identical to SEQ ID NO: 10227
  Description of Artificial Sequence: Synthetic polynucleotide

SEQ ID NO: 12040 - DNA, 1100 bp, Artificial Sequence; identical to SEQ ID NO: 10228
  Description of Artificial Sequence: Synthetic polynucleotide

SEQ ID NO: 12041 - DNA, 214 bp, Artificial Sequence; identical to SEQ ID NO: 10229
  Description of Artificial Sequence: Synthetic polynucleotide

SEQ ID NO: 12042 - DNA, 582 bp, Artificial Sequence; identical to SEQ ID NO: 10230
  Description of Artificial Sequence: Synthetic polynucleotide

SEQ ID NO: 12043 - DNA, 203 bp, Artificial Sequence; identical to SEQ ID NO: 10231
  Description of Artificial Sequence: Synthetic polynucleotide

SEQ ID NO: 12044 - DNA, 823 bp, Artificial Sequence; identical to SEQ ID NO: 10232
  Description of Artificial Sequence: Synthetic polynucleotide

SEQ ID NO: 12045 - DNA, 293 bp, Artificial Sequence; identical to SEQ ID NO: 10233
  Description of Artificial Sequence: Synthetic polynucleotide

SEQ ID NO: 12046 - DNA, 262 bp, Artificial Sequence; identical to SEQ ID NO: 10234
  Description of Artificial Sequence: Synthetic polynucleotide

SEQ ID NO: 12047 - DNA, 240 bp, Artificial Sequence; identical to SEQ ID NO: 10235
  Description of Artificial Sequence: Synthetic polynucleotide

SEQ ID NO: 12048 - DNA, 1240 bp, Artificial Sequence; identical to SEQ ID NO: 10236
  Description of Artificial Sequence: Synthetic polynucleotide

SEQ ID NO: 12049 - DNA, 222 bp, Artificial Sequence; identical to SEQ ID NO: 10237
  Description of Artificial Sequence: Synthetic polynucleotide

SEQ ID NO: 12050 - DNA, 714 bp, Artificial Sequence; identical to SEQ ID NO: 10238
  Description of Artificial Sequence: Synthetic polynucleotide

SEQ ID NO: 12051 - DNA, 1216 bp, Artificial Sequence; identical to SEQ ID NO: 10239
  Description of Artificial Sequence: Synthetic polynucleotide

SEQ ID NO: 12052 - DNA, 207 bp, Artificial Sequence; identical to SEQ ID NO: 10240
  Description of Artificial Sequence: Synthetic polynucleotide

SEQ ID NO: 12053 - DNA, 253 bp, Artificial Sequence; identical to SEQ ID NO: 10241
  Description of Artificial Sequence: Synthetic polynucleotide

SEQ ID NO: 12054 - DNA, 209 bp, Artificial Sequence; identical to SEQ ID NO: 10242
  Description of Artificial Sequence: Synthetic polynucleotide

SEQ ID NO: 12055 - DNA, 225 bp, Artificial Sequence; identical to SEQ ID NO: 10243
  Description of Artificial Sequence: Synthetic polynucleotide

SEQ ID NO: 12056 - DNA, 1133 bp, Artificial Sequence; identical to SEQ ID NO: 10244
  Description of Artificial Sequence: Synthetic polynucleotide

SEQ ID NO: 12057 - DNA, 478 bp, Artificial Sequence; identical to SEQ ID NO: 10245
  Description of Artificial Sequence: Synthetic polynucleotide

SEQ ID NO: 12058 - DNA, 201 bp, Artificial Sequence; identical to SEQ ID NO: 10246
  Description of Artificial Sequence: Synthetic polynucleotide

SEQ ID NO: 12059 - DNA, 208 bp, Artificial Sequence; identical to SEQ ID NO: 10247
  Description of Artificial Sequence: Synthetic polynucleotide

SEQ ID NO: 12060 - DNA, 210 bp, Artificial Sequence; identical to SEQ ID NO: 10248
  Description of Artificial Sequence: Synthetic polynucleotide

SEQ ID NO: 12061 - DNA, 229 bp, Artificial Sequence; identical to SEQ ID NO: 10249
  Description of Artificial Sequence: Synthetic polynucleotide

SEQ ID NO: 12062 - DNA, 209 bp, Artificial Sequence; identical to SEQ ID NO: 10250
  Description of Artificial Sequence: Synthetic polynucleotide

SEQ ID NO: 12063 - DNA, 255 bp, Artificial Sequence; identical to SEQ ID NO: 10251
  Description of Artificial Sequence: Synthetic polynucleotide

SEQ ID NO: 12064 - DNA, 297 bp, Artificial Sequence; identical to SEQ ID NO: 10252
  Description of Artificial Sequence: Synthetic polynucleotide

SEQ ID NO: 12065 - DNA, 232 bp, Artificial Sequence; identical to SEQ ID NO: 10253
  Description of Artificial Sequence: Synthetic polynucleotide

SEQ ID NO: 12066 - DNA, 247 bp, Artificial Sequence; identical to SEQ ID NO: 10254
  Description of Artificial Sequence: Synthetic polynucleotide

SEQ ID NO: 12067 - DNA, 241 bp, Artificial Sequence; identical to SEQ ID NO: 10263
  Description of Artificial Sequence: Synthetic polynucleotide

SEQ ID NO: 12068 - DNA, 239 bp, Artificial Sequence; identical to SEQ ID NO: 10274
  Description of Artificial Sequence: Synthetic polynucleotide

SEQ ID NO: 12069 - DNA, 201 bp, Artificial Sequence; identical to SEQ ID NO: 10285
  Description of Artificial Sequence: Synthetic polynucleotide

SEQ ID NO: 12070 - DNA, 241 bp, Artificial Sequence; identical to SEQ ID NO: 10296
  Description of Artificial Sequence: Synthetic polynucleotide

SEQ ID NO: 12071 - DNA, 219 bp, Artificial Sequence; identical to SEQ ID NO: 10307
  Description of Artificial Sequence: Synthetic polynucleotide

SEQ ID NO: 12072 - DNA, 315 bp, Artificial Sequence; identical to SEQ ID NO: 10308
  Description of Artificial Sequence: Synthetic polynucleotide

SEQ ID NO: 12073 - DNA, 243 bp, Artificial Sequence; identical to SEQ ID NO: 10319
  Description of Artificial Sequence: Synthetic polynucleotide

SEQ ID NO: 12074 - DNA, 233 bp, Artificial Sequence; identical to SEQ ID NO: 10330
  Description of Artificial Sequence: Synthetic polynucleotide

SEQ ID NO: 12075 - DNA, 410 bp, Artificial Sequence; identical to SEQ ID NO: 10341
  Description of Artificial Sequence: Synthetic polynucleotide

SEQ ID NO: 12076 - DNA, 294 bp, Artificial Sequence; identical to SEQ ID NO: 10352
  Description of Artificial Sequence: Synthetic polynucleotide

SEQ ID NO: 12077 - DNA, 463 bp, Artificial Sequence; identical to SEQ ID NO: 10363
  Description of Artificial Sequence: Synthetic polynucleotide

SEQ ID NO: 12078 - DNA, 258 bp, Artificial Sequence; identical to SEQ ID NO: 10374
  Description of Artificial Sequence: Synthetic polynucleotide

SEQ ID NO: 12079 - DNA, 203 bp, Artificial Sequence; identical to SEQ ID NO: 10385
  Description of Artificial Sequence: Synthetic polynucleotide

SEQ ID NO: 12080 - DNA, 523 bp, Artificial Sequence; identical to SEQ ID NO: 10396
  Description of Artificial Sequence: Synthetic polynucleotide

SEQ ID NO: 12081 - DNA, 301 bp, Artificial Sequence; identical to SEQ ID NO: 10404
  Description of Artificial Sequence: Synthetic polynucleotide

SEQ ID NO: 12082 - DNA, 223 bp, Artificial Sequence; identical to SEQ ID NO: 10405
  Description of Artificial Sequence: Synthetic polynucleotide

SEQ ID NO: 12083 - DNA, 720 bp, Artificial Sequence; identical to SEQ ID NO: 10406
  Description of Artificial Sequence: Synthetic polynucleotide

SEQ ID NO: 12084 - DNA, 1683 bp, Artificial Sequence; identical to SEQ ID NO: 10407
  Description of Artificial Sequence: Synthetic polynucleotide

SEQ ID NO: 12085 - DNA, 233 bp, Artificial Sequence; identical to SEQ ID NO: 10408
  Description of Artificial Sequence: Synthetic polynucleotide

SEQ ID NO: 12086 - DNA, 213 bp, Artificial Sequence; identical to SEQ ID NO: 10409
  Description of Artificial Sequence: Synthetic polynucleotide

SEQ ID NO: 12087 - DNA, 236 bp, Artificial Sequence; identical to SEQ ID NO: 10410
  Description of Artificial Sequence: Synthetic polynucleotide

SEQ ID NO: 12088 - DNA, 233 bp, Artificial Sequence; identical to SEQ ID NO: 10411
  Description of Artificial Sequence: Synthetic polynucleotide

SEQ ID NO: 12089 - DNA, 737 bp, Artificial Sequence; identical to SEQ ID NO: 10412
  Description of Artificial Sequence: Synthetic polynucleotide

SEQ ID NO: 12090 - DNA, 308 bp, Artificial Sequence; identical to SEQ ID NO: 10413
  Description of Artificial Sequence: Synthetic polynucleotide

SEQ ID NO: 12091 - DNA, 1100 bp, Artificial Sequence; identical to SEQ ID NO: 10414
  Description of Artificial Sequence: Synthetic polynucleotide

SEQ ID NO: 12092 - DNA, 214 bp, Artificial Sequence; identical to SEQ ID NO: 10415
  Description of Artificial Sequence: Synthetic polynucleotide

SEQ ID NO: 12093 - DNA, 582 bp, Artificial Sequence; identical to SEQ ID NO: 10416
  Description of Artificial Sequence: Synthetic polynucleotide

SEQ ID NO: 12094 - DNA, 203 bp, Artificial Sequence; identical to SEQ ID NO: 10417
  Description of Artificial Sequence: Synthetic polynucleotide

SEQ ID NO: 12095 - DNA, 823 bp, Artificial Sequence; identical to SEQ ID NO: 10418
  Description of Artificial Sequence: Synthetic polynucleotide

SEQ ID NO: 12096 - DNA, 293 bp, Artificial Sequence; identical to SEQ ID NO: 10419
  Description of Artificial Sequence: Synthetic polynucleotide

SEQ ID NO: 12097 - DNA, 262 bp, Artificial Sequence; identical to SEQ ID NO: 10420
  Description of Artificial Sequence: Synthetic polynucleotide

SEQ ID NO: 12098 - DNA, 240 bp, Artificial Sequence; identical to SEQ ID NO: 10421
  Description of Artificial Sequence: Synthetic polynucleotide

SEQ ID NO: 12099 - DNA, 1240 bp, Artificial Sequence; identical to SEQ ID NO: 10422
  Description of Artificial Sequence: Synthetic polynucleotide

SEQ ID NO: 12100 - DNA, 222 bp, Artificial Sequence; identical to SEQ ID NO: 10423
  Description of Artificial Sequence: Synthetic polynucleotide

SEQ ID NO: 12101 - DNA, 714 bp, Artificial Sequence; identical to SEQ ID NO: 10424
  Description of Artificial Sequence: Synthetic polynucleotide

SEQ ID NO: 12102 - DNA, 1216 bp, Artificial Sequence; identical to SEQ ID NO: 10425
  Description of Artificial Sequence: Synthetic polynucleotide

SEQ ID NO: 12103 - DNA, 207 bp, Artificial Sequence; identical to SEQ ID NO: 10426
  Description of Artificial Sequence: Synthetic polynucleotide

SEQ ID NO: 12104 - DNA, 253 bp, Artificial Sequence; identical to SEQ ID NO: 10427
  Description of Artificial Sequence: Synthetic polynucleotide

SEQ ID NO: 12105 - DNA, 209 bp, Artificial Sequence; identical to SEQ ID NO: 10428
  Description of Artificial Sequence: Synthetic polynucleotide

SEQ ID NO: 12106 - DNA, 225 bp, Artificial Sequence; identical to SEQ ID NO: 10429
  Description of Artificial Sequence: Synthetic polynucleotide

SEQ ID NO: 12107 - DNA, 1133 bp, Artificial Sequence; identical to SEQ ID NO: 10430
  Description of Artificial Sequence: Synthetic polynucleotide

SEQ ID NO: 12108 - DNA, 478 bp, Artificial Sequence; identical to SEQ ID NO: 10431
  Description of Artificial Sequence: Synthetic polynucleotide

SEQ ID NO: 12109 - DNA, 201 bp, Artificial Sequence; identical to SEQ ID NO: 10432
  Description of Artificial Sequence: Synthetic polynucleotide

SEQ ID NO: 12110 - DNA, 208 bp, Artificial Sequence; identical to SEQ ID NO: 10433
  Description of Artificial Sequence: Synthetic polynucleotide

SEQ ID NO: 12111 - DNA, 210 bp, Artificial Sequence; identical to SEQ ID NO: 10434
  Description of Artificial Sequence: Synthetic polynucleotide

SEQ ID NO: 12112 - DNA, 229 bp, Artificial Sequence; identical to SEQ ID NO: 10435
  Description of Artificial Sequence: Synthetic polynucleotide

SEQ ID NO: 12113 - DNA, 209 bp, Artificial Sequence; identical to SEQ ID NO: 10436
  Description of Artificial Sequence: Synthetic polynucleotide

SEQ ID NO: 12114 - DNA, 255 bp, Artificial Sequence; identical to SEQ ID NO: 10437
  Description of Artificial Sequence: Synthetic polynucleotide

SEQ ID NO: 12115 - DNA, 297 bp, Artificial Sequence; identical to SEQ ID NO: 10438
  Description of Artificial Sequence: Synthetic polynucleotide

SEQ ID NO: 12116 - DNA, 232 bp, Artificial Sequence; identical to SEQ ID NO: 10439
  Description of Artificial Sequence: Synthetic polynucleotide

SEQ ID NO: 12117 - DNA, 247 bp, Artificial Sequence; identical to SEQ ID NO: 10440
  Description of Artificial Sequence: Synthetic polynucleotide

SEQ ID NO: 12118 - DNA, 241 bp, Artificial Sequence; identical to SEQ ID NO: 10449
  Description of Artificial Sequence: Synthetic polynucleotide

SEQ ID NO: 12119 - DNA, 239 bp, Artificial Sequence; identical to SEQ ID NO: 10460
  Description of Artificial Sequence: Synthetic polynucleotide

SEQ ID NO: 12120 - DNA, 201 bp, Artificial Sequence; identical to SEQ ID NO: 10471
  Description of Artificial Sequence: Synthetic polynucleotide

SEQ ID NO: 12121 - DNA, 241 bp, Artificial Sequence; identical to SEQ ID NO: 10482
  Description of Artificial Sequence: Synthetic polynucleotide

SEQ ID NO: 12122 - DNA, 219 bp, Artificial Sequence; identical to SEQ ID NO: 10493
  Description of Artificial Sequence: Synthetic polynucleotide

SEQ ID NO: 12123 - DNA, 315 bp, Artificial Sequence; identical to SEQ ID NO: 10494
  Description of Artificial Sequence: Synthetic polynucleotide

SEQ ID NO: 12124 - DNA, 243 bp, Artificial Sequence; identical to SEQ ID NO: 10505
  Description of Artificial Sequence: Synthetic polynucleotide

SEQ ID NO: 12125 - DNA, 233 bp, Artificial Sequence; identical to SEQ ID NO: 10516
  Description of Artificial Sequence: Synthetic polynucleotide

SEQ ID NO: 12126 - DNA, 410 bp, Artificial Sequence; identical to SEQ ID NO: 10527
  Description of Artificial Sequence: Synthetic polynucleotide

SEQ ID NO: 12127 - DNA, 294 bp, Artificial Sequence; identical to SEQ ID NO: 10538
  Description of Artificial Sequence: Synthetic polynucleotide

SEQ ID NO: 12128 - DNA, 463 bp, Artificial Sequence; identical to SEQ ID NO: 10549
  Description of Artificial Sequence: Synthetic polynucleotide

SEQ ID NO: 12129 - DNA, 258 bp, Artificial Sequence; identical to SEQ ID NO: 10560
  Description of Artificial Sequence: Synthetic polynucleotide

SEQ ID NO: 12130 - DNA, 203 bp, Artificial Sequence; identical to SEQ ID NO: 10571
  Description of Artificial Sequence: Synthetic polynucleotide

SEQ ID NO: 12131 - DNA, 523 bp, Artificial Sequence; identical to SEQ ID NO: 10582
  Description of Artificial Sequence: Synthetic polynucleotide

SEQ ID NO: 12132 - DNA, 301 bp, Artificial Sequence; identical to SEQ ID NO: 10590
  Description of Artificial Sequence: Synthetic polynucleotide

SEQ ID NO: 12133 - DNA, 223 bp, Artificial Sequence; identical to SEQ ID NO: 10591
  Description of Artificial Sequence: Synthetic polynucleotide

SEQ ID NO: 12134 - DNA, 720 bp, Artificial Sequence; identical to SEQ ID NO: 10592
  Description of Artificial Sequence: Synthetic polynucleotide

SEQ ID NO: 12135 - DNA, 1683 bp, Artificial Sequence; identical to SEQ ID NO: 10593
  Description of Artificial Sequence: Synthetic polynucleotide

SEQ ID NO: 12136 - DNA, 233 bp, Artificial Sequence; identical to SEQ ID NO: 10594
  Description of Artificial Sequence: Synthetic polynucleotide

SEQ ID NO: 12137 - DNA, 213 bp, Artificial Sequence; identical to SEQ ID NO: 10595
  Description of Artificial Sequence: Synthetic polynucleotide

SEQ ID NO: 12138 - DNA, 236 bp, Artificial Sequence; identical to SEQ ID NO: 10596
  Description of Artificial Sequence: Synthetic polynucleotide

SEQ ID NO: 12139 - DNA, 233 bp, Artificial Sequence; identical to SEQ ID NO: 10597
  Description of Artificial Sequence: Synthetic polynucleotide

SEQ ID NO: 12140 - DNA, 737 bp, Artificial Sequence; identical to SEQ ID NO: 10598
  Description of Artificial Sequence: Synthetic polynucleotide

SEQ ID NO: 12141 - DNA, 308 bp, Artificial Sequence; identical to SEQ ID NO: 10599
  Description of Artificial Sequence: Synthetic polynucleotide

SEQ ID NO: 12142 - DNA, 1100 bp, Artificial Sequence; identical to SEQ ID NO: 10600
  Description of Artificial Sequence: Synthetic polynucleotide

SEQ ID NO: 12143 - DNA, 214 bp, Artificial Sequence; identical to SEQ ID NO: 10601
  Description of Artificial Sequence: Synthetic polynucleotide

SEQ ID NO: 12144 - DNA, 582 bp, Artificial Sequence; identical to SEQ ID NO: 10602
  Description of Artificial Sequence: Synthetic polynucleotide

SEQ ID NO: 12145 - DNA, 203 bp, Artificial Sequence; identical to SEQ ID NO: 10603
  Description of Artificial Sequence: Synthetic polynucleotide

SEQ ID NO: 12146 - DNA, 823 bp, Artificial Sequence; identical to SEQ ID NO: 10604
  Description of Artificial Sequence: Synthetic polynucleotide

SEQ ID NO: 12147 - DNA, 293 bp, Artificial Sequence; identical to SEQ ID NO: 10605
  Description of Artificial Sequence: Synthetic polynucleotide

SEQ ID NO: 12148 - DNA, 262 bp, Artificial Sequence; identical to SEQ ID NO: 10606
  Description of Artificial Sequence: Synthetic polynucleotide

SEQ ID NO: 12149 - DNA, 240 bp, Artificial Sequence; identical to SEQ ID NO: 10607
  Description of Artificial Sequence: Synthetic polynucleotide

SEQ ID NO: 12150 - DNA, 1240 bp, Artificial Sequence; identical to SEQ ID NO: 10608
  Description of Artificial Sequence: Synthetic polynucleotide

SEQ ID NO: 12151 - DNA, 222 bp, Artificial Sequence; identical to SEQ ID NO: 10609
  Description of Artificial Sequence: Synthetic polynucleotide

SEQ ID NO: 12152 - DNA, 714 bp, Artificial Sequence; identical to SEQ ID NO: 10610
  Description of Artificial Sequence: Synthetic polynucleotide

SEQ ID NO: 12153 - DNA, 1216 bp, Artificial Sequence; identical to SEQ ID NO: 10611
  Description of Artificial Sequence: Synthetic polynucleotide

SEQ ID NO: 12154 - DNA, 207 bp, Artificial Sequence; identical to SEQ ID NO: 10612
  Description of Artificial Sequence: Synthetic polynucleotide

SEQ ID NO: 12155 - DNA, 253 bp, Artificial Sequence; identical to SEQ ID NO: 10613
  Description of Artificial Sequence: Synthetic polynucleotide

SEQ ID NO: 12156 - DNA, 209 bp, Artificial Sequence; identical to SEQ ID NO: 10614
  Description of Artificial Sequence: Synthetic polynucleotide

SEQ ID NO: 12157 - DNA, 225 bp, Artificial Sequence; identical to SEQ ID NO: 10615
  Description of Artificial Sequence: Synthetic polynucleotide

SEQ ID NO: 12158 - DNA, 1133 bp, Artificial Sequence; identical to SEQ ID NO: 10616
  Description of Artificial Sequence: Synthetic polynucleotide

SEQ ID NO: 12159 - DNA, 478 bp, Artificial Sequence; identical to SEQ ID NO: 10617
  Description of Artificial Sequence: Synthetic polynucleotide

SEQ ID NO: 12160 - DNA, 201 bp, Artificial Sequence; identical to SEQ ID NO: 10618
  Description of Artificial Sequence: Synthetic polynucleotide

SEQ ID NO: 12161 - DNA, 208 bp, Artificial Sequence; identical to SEQ ID NO: 10619
  Description of Artificial Sequence: Synthetic polynucleotide

SEQ ID NO: 12162 - DNA, 210 bp, Artificial Sequence; identical to SEQ ID NO: 10620
  Description of Artificial Sequence: Synthetic polynucleotide

SEQ ID NO: 12163 - DNA, 229 bp, Artificial Sequence; identical to SEQ ID NO: 10621
  Description of Artificial Sequence: Synthetic polynucleotide

SEQ ID NO: 12164 - DNA, 209 bp, Artificial Sequence; identical to SEQ ID NO: 10622
  Description of Artificial Sequence: Synthetic polynucleotide

SEQ ID NO: 12165 - DNA, 255 bp, Artificial Sequence; identical to SEQ ID NO: 10623
  Description of Artificial Sequence: Synthetic polynucleotide

SEQ ID NO: 12166 - DNA, 297 bp, Artificial Sequence; identical to SEQ ID NO: 10624
  Description of Artificial Sequence: Synthetic polynucleotide

SEQ ID NO: 12167 - DNA, 232 bp, Artificial Sequence; identical to SEQ ID NO: 10625
  Description of Artificial Sequence: Synthetic polynucleotide

SEQ ID NO: 12168 - DNA, 247 bp, Artificial Sequence; identical to SEQ ID NO: 10626
  Description of Artificial Sequence: Synthetic polynucleotide

SEQ ID NO: 12169 - DNA, 241 bp, Artificial Sequence; identical to SEQ ID NO: 10635
  Description of Artificial Sequence: Synthetic polynucleotide

SEQ ID NO: 12170 - DNA, 239 bp, Artificial Sequence; identical to SEQ ID NO: 10646
  Description of Artificial Sequence: Synthetic polynucleotide

SEQ ID NO: 12171 - DNA, 201 bp, Artificial Sequence; identical to SEQ ID NO: 10657
  Description of Artificial Sequence: Synthetic polynucleotide

SEQ ID NO: 12172 - DNA, 241 bp, Artificial Sequence; identical to SEQ ID NO: 10668
  Description of Artificial Sequence: Synthetic polynucleotide

SEQ ID NO: 12173 - DNA, 848 bp, Homo sapiens; identical to SEQ ID NO: 10679

SEQ ID NO: 12174 - DNA, 1230 bp, Homo sapiens; identical to SEQ ID NO: 10680

SEQ ID NO: 12175 - DNA, 2172 bp, Homo sapiens; identical to SEQ ID NO: 10695

SEQ ID NO: 12176 - DNA, 338 bp, Homo sapiens; identical to SEQ ID NO: 10703

SEQ ID NO: 12177 - DNA, 5715 bp, Homo sapiens; identical to SEQ ID NO: 10711

SEQ ID NO: 12178 - DNA, 1059 bp, Homo sapiens; identical to SEQ ID NO: 10717

SEQ ID NO: 12179 - DNA, 1503 bp, Homo sapiens; identical to SEQ ID NO: 10725

SEQ ID NO: 12180 - DNA, 1437 bp, Homo sapiens; identical to SEQ ID NO: 10734

SEQ ID NO: 12181 - DNA, 1203 bp, Homo sapiens; identical to SEQ ID NO: 10743

SEQ ID NO: 12182 - DNA, 206 bp, Homo sapiens; identical to SEQ ID NO: 10749

SEQ ID NO: 12183 - DNA, 1141 bp, Homo sapiens; identical to SEQ ID NO: 10750

SEQ ID NO: 12184 - DNA, 1819 bp, Homo sapiens; identical to SEQ ID NO: 10751

SEQ ID NO: 12185 - DNA, 1813 bp, Homo sapiens; identical to SEQ ID NO: 10752

SEQ ID NO: 12186 - DNA, 1872 bp, Homo sapiens; identical to SEQ ID NO: 10753

SEQ ID NO: 12187 - DNA, 652 bp, Homo sapiens; identical to SEQ ID NO: 10754

SEQ ID NO: 12188 - DNA, 722 bp, Homo sapiens; identical to SEQ ID NO: 10755

SEQ ID NO: 12189 - DNA, 858 bp, Homo sapiens; identical to SEQ ID NO: 10756

SEQ ID NO: 12190 - DNA, 598 bp, Homo sapiens; identical to SEQ ID NO: 10757

SEQ ID NO: 12191 - DNA, 1281 bp, Homo sapiens; identical to SEQ ID NO: 10758

SEQ ID NO: 12192 - DNA, 1788 bp, Homo sapiens; identical to SEQ ID NO: 10759

SEQ ID NO: 12193 - DNA, 626 bp, Homo sapiens; identical to SEQ ID NO: 10760

SEQ ID NO: 12194 - DNA, 1037 bp, Homo sapiens; identical to SEQ ID NO: 10761

SEQ ID NO: 12195 - DNA, 977 bp, Homo sapiens; identical to SEQ ID NO: 10762

SEQ ID NO: 12196 - DNA, 6206 bp, Homo sapiens; identical to SEQ ID NO: 10763

SEQ ID NO: 12197 - DNA, 574 bp, Homo sapiens; identical to SEQ ID NO: 10764

SEQ ID NO: 12198 - DNA, 3438 bp, Homo sapiens; identical to SEQ ID NO: 10765

SEQ ID NO: 12199 - DNA, 4088 bp, Homo sapiens; identical to SEQ ID NO: 10766

SEQ ID NO: 12200 - DNA, 522 bp, Homo sapiens; identical to SEQ ID NO: 10767

SEQ ID NO: 12201 - DNA, 2260 bp, Homo sapiens; identical to SEQ ID NO: 10768

SEQ ID NO: 12202 - DNA, 1502 bp, Homo sapiens; identical to SEQ ID NO: 10769

SEQ ID NO: 12203 - DNA, 510 bp, Homo sapiens; identical to SEQ ID NO: 10770

SEQ ID NO: 12204 - DNA, 940 bp, Homo sapiens; identical to SEQ ID NO: 10771

SEQ ID NO: 12205 - DNA, 2718 bp, Homo sapiens; identical to SEQ ID NO: 10772

SEQ ID NO: 12206 - DNA, 2661 bp, Homo sapiens; identical to SEQ ID NO: 10773

SEQ ID NO: 12207 - DNA, 801 bp, Homo sapiens; identical to SEQ ID NO: 10774

SEQ ID NO: 12208 - DNA, 311 bp, Homo sapiens; identical to SEQ ID NO: 10775

SEQ ID NO: 12209 - DNA, 1048 bp, Homo sapiens; identical to SEQ ID NO: 10776

SEQ ID NO: 12210 - DNA, 301 bp, Homo sapiens; identical to SEQ ID NO: 10777

SEQ ID NO: 12211 - DNA, 1395 bp, Homo sapiens; identical to SEQ ID NO: 10778

SEQ ID NO: 12212 - DNA, 766 bp, Homo sapiens; identical to SEQ ID NO: 10779

SEQ ID NO: 12213 - DNA, 691 bp, Homo sapiens; identical to SEQ ID NO: 10780

SEQ ID NO: 12214 - DNA, 1024 bp, Homo sapiens; identical to SEQ ID NO: 10781

SEQ ID NO: 12215 - DNA, 1339 bp, Homo sapiens; identical to SEQ ID NO: 10782

SEQ ID NO: 12216 - DNA, 1376 bp, Homo sapiens; identical to SEQ ID NO: 10791

SEQ ID NO: 12217 - DNA, 3843 bp, Homo sapiens; identical to SEQ ID NO: 10798

SEQ ID NO: 12218 - DNA, 1622 bp, Homo sapiens; identical to SEQ ID NO: 10806

SEQ ID NO: 12219 - DNA, 1441 bp, Homo sapiens; identical to SEQ ID NO: 10817

SEQ ID NO: 12220 - DNA, 848 bp, Homo sapiens; identical to SEQ ID NO: 10826

SEQ ID NO: 12221 - DNA, 1230 bp, Homo sapiens; identical to SEQ ID NO: 10827

SEQ ID NO: 12222 - DNA, 2172 bp, Homo sapiens; identical to SEQ ID NO: 10842

SEQ ID NO: 12223 - DNA, 338 bp, Homo sapiens; identical to SEQ ID NO: 10850

SEQ ID NO: 12224 - DNA, 5715 bp, Homo sapiens; identical to SEQ ID NO: 10858

SEQ ID NO: 12225 - DNA, 1059 bp, Homo sapiens; identical to SEQ ID NO: 10864

SEQ ID NO: 12226 - DNA, 1503 bp, Homo sapiens; identical to SEQ ID NO: 10872

SEQ ID NO: 12227 - DNA, 1437 bp, Homo sapiens; identical to SEQ ID NO: 10881

SEQ ID NO: 12228 - DNA, 1203 bp, Homo sapiens; identical to SEQ ID NO: 10890

SEQ ID NO: 12229 - DNA, 206 bp, Homo sapiens; identical to SEQ ID NO: 10896

SEQ ID NO: 12230 - DNA, 1141 bp, Homo sapiens; identical to SEQ ID NO: 10897

SEQ ID NO: 12231 - DNA, 1819 bp, Homo sapiens; identical to SEQ ID NO: 10898

SEQ ID NO: 12232 - DNA, 1813 bp, Homo sapiens; identical to SEQ ID NO: 10899

SEQ ID NO: 12233 - DNA, 1872 bp, Homo sapiens; identical to SEQ ID NO: 10900

SEQ ID NO: 12234 - DNA, 652 bp, Homo sapiens; identical to SEQ ID NO: 10901

SEQ ID NO: 12235 - DNA, 722 bp, Homo sapiens; identical to SEQ ID NO: 10902

SEQ ID NO: 12236 - DNA, 858 bp, Homo sapiens; identical to SEQ ID NO: 10903

SEQ ID NO: 12237 - DNA, 598 bp, Homo sapiens; identical to SEQ ID NO: 10904

SEQ ID NO: 12238 - DNA, 1281 bp, Homo sapiens; identical to SEQ ID NO: 10905

SEQ ID NO: 12239 - DNA, 1788 bp, Homo sapiens; identical to SEQ ID NO: 10906

SEQ ID NO: 12240 - DNA, 626 bp, Homo sapiens; identical to SEQ ID NO: 10907

SEQ ID NO: 12241 - DNA, 1037 bp, Homo sapiens; identical to SEQ ID NO: 10908

SEQ ID NO: 12242 - DNA, 977 bp, Homo sapiens; identical to SEQ ID NO: 10909

SEQ ID NO: 12243 - DNA, 6206 bp, Homo sapiens; identical to SEQ ID NO: 10910

SEQ ID NO: 12244 - DNA, 574 bp, Homo sapiens; identical to SEQ ID NO: 10911

SEQ ID NO: 12245 - DNA, 3438 bp, Homo sapiens; identical to SEQ ID NO: 10912

SEQ ID NO: 12246 - DNA, 4088 bp, Homo sapiens; identical to SEQ ID NO: 10913

SEQ ID NO: 12247 - DNA, 522 bp, Homo sapiens; identical to SEQ ID NO: 10914

SEQ ID NO: 12248 - DNA, 2260 bp, Homo sapiens; identical to SEQ ID NO: 10915

SEQ ID NO: 12249 - DNA, 1502 bp, Homo sapiens; identical to SEQ ID NO: 10916

SEQ ID NO: 12250 - DNA, 510 bp, Homo sapiens; identical to SEQ ID NO: 10917

SEQ ID NO: 12251 - DNA, 940 bp, Homo sapiens; identical to SEQ ID NO: 10918

SEQ ID NO: 12252 - DNA, 2718 bp, Homo sapiens; identical to SEQ ID NO: 10919

SEQ ID NO: 12253 - DNA, 2661 bp, Homo sapiens; identical to SEQ ID NO: 10920

SEQ ID NO: 12254 - DNA, 801 bp, Homo sapiens; identical to SEQ ID NO: 10921

SEQ ID NO: 12255 - DNA, 311 bp, Homo sapiens; identical to SEQ ID NO: 10922

SEQ ID NO: 12256 - DNA, 1048 bp, Homo sapiens; identical to SEQ ID NO: 10923

SEQ ID NO: 12257 - DNA, 301 bp, Homo sapiens; identical to SEQ ID NO: 10924

SEQ ID NO: 12258 - DNA, 1395 bp, Homo sapiens; identical to SEQ ID NO: 10925

SEQ ID NO: 12259 - DNA, 766 bp, Homo sapiens; identical to SEQ ID NO: 10926

SEQ ID NO: 12260 - DNA, 691 bp, Homo sapiens; identical to SEQ ID NO: 10927

SEQ ID NO: 12261 - DNA, 1024 bp, Homo sapiens; identical to SEQ ID NO: 10928

SEQ ID NO: 12262 - DNA, 1339 bp, Homo sapiens; identical to SEQ ID NO: 10929

SEQ ID NO: 12263 - DNA, 1376 bp, Homo sapiens; identical to SEQ ID NO: 10938

SEQ ID NO: 12264 - DNA, 3843 bp, Homo sapiens; identical to SEQ ID NO: 10945

SEQ ID NO: 12265 - DNA, 1622 bp, Homo sapiens; identical to SEQ ID NO: 10953

SEQ ID NO: 12266 - DNA, 1441 bp, Homo sapiens; identical to SEQ ID NO: 10964

SEQ ID NO: 12267 - DNA, 848 bp, Artificial Sequence; identical to SEQ ID NO: 10973
  Description of Artificial Sequence: Synthetic polynucleotide

SEQ ID NO: 12268 - DNA, 1230 bp, Artificial Sequence; identical to SEQ ID NO: 10974
  Description of Artificial Sequence: Synthetic polynucleotide

SEQ ID NO: 12269 - DNA, 2172 bp, Artificial Sequence; identical to SEQ ID NO: 10989
  Description of Artificial Sequence: Synthetic polynucleotide

SEQ ID NO: 12270 - DNA, 338 bp, Artificial Sequence; identical to SEQ ID NO: 10997
  Description of Artificial Sequence: Synthetic polynucleotide

SEQ ID NO: 12271 - DNA, 5715 bp, Artificial Sequence; identical to SEQ ID NO: 11005
  Description of Artificial Sequence: Synthetic polynucleotide

SEQ ID NO: 12272 - DNA, 1059 bp, Artificial Sequence; identical to SEQ ID NO: 11011
  Description of Artificial Sequence: Synthetic polynucleotide

SEQ ID NO: 12273 - DNA, 1503 bp, Artificial Sequence; identical to SEQ ID NO: 11019
  Description of Artificial Sequence: Synthetic polynucleotide

SEQ ID NO: 12274 - DNA, 1437 bp, Artificial Sequence; identical to SEQ ID NO: 11028
  Description of Artificial Sequence: Synthetic polynucleotide

SEQ ID NO: 12275 - DNA, 1203 bp, Artificial Sequence; identical to SEQ ID NO: 11037
  Description of Artificial Sequence: Synthetic polynucleotide

SEQ ID NO: 12276 - DNA, 206 bp, Artificial Sequence; identical to SEQ ID NO: 11043
  Description of Artificial Sequence: Synthetic polynucleotide

SEQ ID NO: 12277 - DNA, 1141 bp, Artificial Sequence; identical to SEQ ID NO: 11044
  Description of Artificial Sequence: Synthetic polynucleotide

SEQ ID NO: 12278 - DNA, 1819 bp, Artificial Sequence; identical to SEQ ID NO: 11045
  Description of Artificial Sequence: Synthetic polynucleotide

SEQ ID NO: 12279 - DNA, 1813 bp, Artificial Sequence; identical to SEQ ID NO: 11046
  Description of Artificial Sequence: Synthetic polynucleotide

SEQ ID NO: 12280 - DNA, 1872 bp, Artificial Sequence; identical to SEQ ID NO: 11047
  Description of Artificial Sequence: Synthetic polynucleotide

SEQ ID NO: 12281 - DNA, 652 bp, Artificial Sequence; identical to SEQ ID NO: 11048
  Description of Artificial Sequence: Synthetic polynucleotide

SEQ ID NO: 12282 - DNA, 722 bp, Artificial Sequence; identical to SEQ ID NO: 11049
  Description of Artificial Sequence: Synthetic polynucleotide

SEQ ID NO: 12283 - DNA, 858 bp, Artificial Sequence; identical to SEQ ID NO: 11050
  Description of Artificial Sequence: Synthetic polynucleotide

SEQ ID NO: 12284 - DNA, 598 bp, Artificial Sequence; identical to SEQ ID NO: 11051
  Description of Artificial Sequence: Synthetic polynucleotide

SEQ ID NO: 12285 - DNA, 1281 bp, Artificial Sequence; identical to SEQ ID NO: 11052
  Description of Artificial Sequence: Synthetic polynucleotide

SEQ ID NO: 12286 - DNA, 1788 bp, Artificial Sequence; identical to SEQ ID NO: 11053
  Description of Artificial Sequence: Synthetic polynucleotide

SEQ ID NO: 12287 - DNA, 626 bp, Artificial Sequence; identical to SEQ ID NO: 11054
  Description of Artificial Sequence: Synthetic polynucleotide

SEQ ID NO: 12288 - DNA, 1037 bp, Artificial Sequence; identical to SEQ ID NO: 11055
  Description of Artificial Sequence: Synthetic polynucleotide

SEQ ID NO: 12289 - DNA, 977 bp, Artificial Sequence; identical to SEQ ID NO: 11056
  Description of Artificial Sequence: Synthetic polynucleotide

SEQ ID NO: 12290 - DNA, 6206 bp, Artificial Sequence; identical to SEQ ID NO: 11057
  Description of Artificial Sequence: Synthetic polynucleotide

SEQ ID NO: 12291 - DNA, 574 bp, Artificial Sequence; identical to SEQ ID NO: 11058
  Description of Artificial Sequence: Synthetic polynucleotide

SEQ ID NO: 12292 - DNA, 3438 bp, Artificial Sequence; identical to SEQ ID NO: 11059
  Description of Artificial Sequence: Synthetic polynucleotide

SEQ ID NO: 12293 - DNA, 4088 bp, Artificial Sequence; identical to SEQ ID NO: 11060
  Description of Artificial Sequence: Synthetic polynucleotide

SEQ ID NO: 12294 - DNA, 522 bp, Artificial Sequence; identical to SEQ ID NO: 11061
  Description of Artificial Sequence: Synthetic polynucleotide

SEQ ID NO: 12295 - DNA, 2260 bp, Artificial Sequence; identical to SEQ ID NO: 11062
  Description of Artificial Sequence: Synthetic polynucleotide

SEQ ID NO: 12296 - DNA, 1502 bp, Artificial Sequence; identical to SEQ ID NO: 11063
  Description of Artificial Sequence: Synthetic polynucleotide

SEQ ID NO: 12297 - DNA, 510 bp, Artificial Sequence; identical to SEQ ID NO: 11064
  Description of Artificial Sequence: Synthetic polynucleotide

SEQ ID NO: 12298 - DNA, 940 bp, Artificial Sequence; identical to SEQ ID NO: 11065
  Description of Artificial Sequence: Synthetic polynucleotide

SEQ ID NO: 12299 - DNA, 2718 bp, Artificial Sequence; identical to SEQ ID NO: 11066
  Description of Artificial Sequence: Synthetic polynucleotide

SEQ ID NO: 12300 - DNA, 2661 bp, Artificial Sequence; identical to SEQ ID NO: 11067
  Description of Artificial Sequence: Synthetic polynucleotide

SEQ ID NO: 12301 - DNA, 801 bp, Artificial Sequence; identical to SEQ ID NO: 11068
  Description of Artificial Sequence: Synthetic polynucleotide

SEQ ID NO: 12302 - DNA, 311 bp, Artificial Sequence; identical to SEQ ID NO: 11069
  Description of Artificial Sequence: Synthetic polynucleotide

SEQ ID NO: 12303 - DNA, 1048 bp, Artificial Sequence; identical to SEQ ID NO: 11070
  Description of Artificial Sequence: Synthetic polynucleotide

SEQ ID NO: 12304 - DNA, 301 bp, Artificial Sequence; identical to SEQ ID NO: 11071
  Description of Artificial Sequence: Synthetic polynucleotide

SEQ ID NO: 12305 - DNA, 1395 bp, Artificial Sequence; identical to SEQ ID NO: 11072
  Description of Artificial Sequence: Synthetic polynucleotide

SEQ ID NO: 12306 - DNA, 766 bp, Artificial Sequence; identical to SEQ ID NO: 11073
  Description of Artificial Sequence: Synthetic polynucleotide

SEQ ID NO: 12307 - DNA, 691 bp, Artificial Sequence; identical to SEQ ID NO: 11074
  Description of Artificial Sequence: Synthetic polynucleotide

SEQ ID NO: 12308 - DNA, 1024 bp, Artificial Sequence; identical to SEQ ID NO: 11075
  Description of Artificial Sequence: Synthetic polynucleotide

SEQ ID NO: 12309 - DNA, 1339 bp, Artificial Sequence; identical to SEQ ID NO: 11076
  Description of Artificial Sequence: Synthetic polynucleotide

SEQ ID NO: 12310 - DNA, 1376 bp, Artificial Sequence; identical to SEQ ID NO: 11085
  Description of Artificial Sequence: Synthetic polynucleotide

SEQ ID NO: 12311 - DNA, 3843 bp, Artificial Sequence; identical to SEQ ID NO: 11092
  Description of Artificial Sequence: Synthetic polynucleotide

SEQ ID NO: 12312 - DNA, 1622 bp, Artificial Sequence; identical to SEQ ID NO: 11100
  Description of Artificial Sequence: Synthetic polynucleotide

SEQ ID NO: 12313 - DNA, 1441 bp, Artificial Sequence; identical to SEQ ID NO: 11111
  Description of Artificial Sequence: Synthetic polynucleotide

SEQ ID NO: 12314 - DNA, 848 bp, Artificial Sequence; identical to SEQ ID NO: 11120
  Description of Artificial Sequence: Synthetic polynucleotide

SEQ ID NO: 12315 - DNA, 1230 bp, Artificial Sequence; identical to SEQ ID NO: 11121
  Description of Artificial Sequence: Synthetic polynucleotide

SEQ ID NO: 12316 - DNA, 2172 bp, Artificial Sequence; identical to SEQ ID NO: 11136
  Description of Artificial Sequence: Synthetic polynucleotide

SEQ ID NO: 12317 - DNA, 338 bp, Artificial Sequence; identical to SEQ ID NO: 11144
  Description of Artificial Sequence: Synthetic polynucleotide

SEQ ID NO: 12318 - DNA, 5715 bp, Artificial Sequence; identical to SEQ ID NO: 11152
  Description of Artificial Sequence: Synthetic polynucleotide

SEQ ID NO: 12319 - DNA, 1059 bp, Artificial Sequence; identical to SEQ ID NO: 11158
  Description of Artificial Sequence: Synthetic polynucleotide

SEQ ID NO: 12320 - DNA, 1503 bp, Artificial Sequence; identical to SEQ ID NO: 11166
  Description of Artificial Sequence: Synthetic polynucleotide

SEQ ID NO: 12321 - DNA, 1437 bp, Artificial Sequence; identical to SEQ ID NO: 11175
  Description of Artificial Sequence: Synthetic polynucleotide

SEQ ID NO: 12322 - DNA, 1203 bp, Artificial Sequence; identical to SEQ ID NO: 11184
  Description of Artificial Sequence: Synthetic polynucleotide

SEQ ID NO: 12323 - DNA, 206 bp, Artificial Sequence; identical to SEQ ID NO: 11190
  Description of Artificial Sequence: Synthetic polynucleotide

SEQ ID NO: 12324 - DNA, 1141 bp, Artificial Sequence; identical to SEQ ID NO: 11191
  Description of Artificial Sequence: Synthetic polynucleotide

SEQ ID NO: 12325 - DNA, 1819 bp, Artificial Sequence; identical to SEQ ID NO: 11192
  Description of Artificial Sequence: Synthetic polynucleotide

SEQ ID NO: 12326 - DNA, 1813 bp, Artificial Sequence; identical to SEQ ID NO: 11193
  Description of Artificial Sequence: Synthetic polynucleotide

SEQ ID NO: 12327 - DNA, 1872 bp, Artificial Sequence; identical to SEQ ID NO: 11194
  Description of Artificial Sequence: Synthetic polynucleotide

SEQ ID NO: 12328 - DNA, 652 bp, Artificial Sequence; identical to SEQ ID NO: 11195
  Description of Artificial Sequence: Synthetic polynucleotide

SEQ ID NO: 12329 - DNA, 722 bp, Artificial Sequence; identical to SEQ ID NO: 11196
  Description of Artificial Sequence: Synthetic polynucleotide

SEQ ID NO: 12330 - DNA, 858 bp, Artificial Sequence; identical to SEQ ID NO: 11197
  Description of Artificial Sequence: Synthetic polynucleotide

SEQ ID NO: 12331 - DNA, 598 bp, Artificial Sequence; identical to SEQ ID NO: 11198
  Description of Artificial Sequence: Synthetic polynucleotide

SEQ ID NO: 12332 - DNA, 1281 bp, Artificial Sequence; identical to SEQ ID NO: 11199
  Description of Artificial Sequence: Synthetic polynucleotide

SEQ ID NO: 12333 - DNA, 1788 bp, Artificial Sequence; identical to SEQ ID NO: 11200
  Description of Artificial Sequence: Synthetic polynucleotide

SEQ ID NO: 12334 - DNA, 626 bp, Artificial Sequence; identical to SEQ ID NO: 11201
  Description of Artificial Sequence: Synthetic polynucleotide

SEQ ID NO: 12335 - DNA, 1037 bp, Artificial Sequence; identical to SEQ ID NO: 11202
  Description of Artificial Sequence: Synthetic polynucleotide

SEQ ID NO: 12336 - DNA, 977 bp, Artificial Sequence; identical to SEQ ID NO: 11203
  Description of Artificial Sequence: Synthetic polynucleotide

SEQ ID NO: 12337 - DNA, 6206 bp, Artificial Sequence; identical to SEQ ID NO: 11204
  Description of Artificial Sequence: Synthetic polynucleotide

SEQ ID NO: 12338 - DNA, 574 bp, Artificial Sequence; identical to SEQ ID NO: 11205
  Description of Artificial Sequence: Synthetic polynucleotide

SEQ ID NO: 12339 - DNA, 3438 bp, Artificial Sequence; identical to SEQ ID NO: 11206
  Description of Artificial Sequence: Synthetic polynucleotide

SEQ ID NO: 12340 - DNA, 4088 bp, Artificial Sequence; identical to SEQ ID NO: 11207
  Description of Artificial Sequence: Synthetic polynucleotide

SEQ ID NO: 12341 - DNA, 522 bp, Artificial Sequence; identical to SEQ ID NO: 11208
  Description of Artificial Sequence: Synthetic polynucleotide

SEQ ID NO: 12342 - DNA, 2260 bp, Artificial Sequence; identical to SEQ ID NO: 11209
  Description of Artificial Sequence: Synthetic polynucleotide

SEQ ID NO: 12343 - DNA, 1502 bp, Artificial Sequence; identical to SEQ ID NO: 11210
  Description of Artificial Sequence: Synthetic polynucleotide

SEQ ID NO: 12344 - DNA, 510 bp, Artificial Sequence; identical to SEQ ID NO: 11211
  Description of Artificial Sequence: Synthetic polynucleotide

SEQ ID NO: 12345 - DNA, 940 bp, Artificial Sequence; identical to SEQ ID NO: 11212
  Description of Artificial Sequence: Synthetic polynucleotide

SEQ ID NO: 12346 - DNA, 2718 bp, Artificial Sequence; identical to SEQ ID NO: 11213
  Description of Artificial Sequence: Synthetic polynucleotide

SEQ ID NO: 12347 - DNA, 2661 bp, Artificial Sequence; identical to SEQ ID NO: 11214
  Description of Artificial Sequence: Synthetic polynucleotide

SEQ ID NO: 12348 - DNA, 801 bp, Artificial Sequence; identical to SEQ ID NO: 11215
  Description of Artificial Sequence: Synthetic polynucleotide

SEQ ID NO: 12349 - DNA, 311 bp, Artificial Sequence; identical to SEQ ID NO: 11216
  Description of Artificial Sequence: Synthetic polynucleotide

SEQ ID NO: 12350 - DNA, 1048 bp, Artificial Sequence; identical to SEQ ID NO: 11217
  Description of Artificial Sequence: Synthetic polynucleotide

SEQ ID NO: 12351 - DNA, 301 bp, Artificial Sequence; identical to SEQ ID NO: 11218
  Description of Artificial Sequence: Synthetic polynucleotide

SEQ ID NO: 12352 - DNA, 1395 bp, Artificial Sequence; identical to SEQ ID NO: 11219
  Description of Artificial Sequence: Synthetic polynucleotide

SEQ ID NO: 12353 - DNA, 766 bp, Artificial Sequence; identical to SEQ ID NO: 11220
  Description of Artificial Sequence: Synthetic polynucleotide

SEQ ID NO: 12354 - DNA, 691 bp, Artificial Sequence; identical to SEQ ID NO: 11221
  Description of Artificial Sequence: Synthetic polynucleotide

SEQ ID NO: 12355 - DNA, 1024 bp, Artificial Sequence; identical to SEQ ID NO: 11222
  Description of Artificial Sequence: Synthetic polynucleotide

SEQ ID NO: 12356 - DNA, 1339 bp, Artificial Sequence; identical to SEQ ID NO: 11223
  Description of Artificial Sequence: Synthetic polynucleotide

SEQ ID NO: 12357 - DNA, 1376 bp, Artificial Sequence; identical to SEQ ID NO: 11232
  Description of Artificial Sequence: Synthetic polynucleotide

SEQ ID NO: 12358 - DNA, 3843 bp, Artificial Sequence; identical to SEQ ID NO: 11239
  Description of Artificial Sequence: Synthetic polynucleotide

SEQ ID NO: 12359 - DNA, 1622 bp, Artificial Sequence; identical to SEQ ID NO: 11247
  Description of Artificial Sequence: Synthetic polynucleotide

SEQ ID NO: 12360 - DNA, 1441 bp, Artificial Sequence; identical to SEQ ID NO: 11258
  Description of Artificial Sequence: Synthetic polynucleotide

SEQ ID NO: 12361 - DNA, 848 bp, Artificial Sequence; identical to SEQ ID NO: 11267
  Description of Artificial Sequence: Synthetic polynucleotide

SEQ ID NO: 12362 - DNA, 1230 bp, Artificial Sequence; identical to SEQ ID NO: 11268
  Description of Artificial Sequence: Synthetic polynucleotide

SEQ ID NO: 12363 - DNA, 2172 bp, Artificial Sequence; identical to SEQ ID NO: 11283
  Description of Artificial Sequence: Synthetic polynucleotide

SEQ ID NO: 12364 - DNA, 338 bp, Artificial Sequence; identical to SEQ ID NO: 11291
  Description of Artificial Sequence: Synthetic polynucleotide

SEQ ID NO: 12365 - DNA, 5715 bp, Artificial Sequence; identical to SEQ ID NO: 11299
  Description of Artificial Sequence: Synthetic polynucleotide

SEQ ID NO: 12366 - DNA, 1059 bp, Artificial Sequence; identical to SEQ ID NO: 11305
  Description of Artificial Sequence: Synthetic polynucleotide

SEQ ID NO: 12367 - DNA, 1503 bp, Artificial Sequence; identical to SEQ ID NO: 11313
  Description of Artificial Sequence: Synthetic polynucleotide

SEQ ID NO: 12368 - DNA, 1437 bp, Artificial Sequence; identical to SEQ ID NO: 11322
  Description of Artificial Sequence: Synthetic polynucleotide

SEQ ID NO: 12369 - DNA, 1203 bp, Artificial Sequence; identical to SEQ ID NO: 11331
  Description of Artificial Sequence: Synthetic polynucleotide

SEQ ID NO: 12370 - DNA, 206 bp, Artificial Sequence; identical to SEQ ID NO: 11337
  Description of Artificial Sequence: Synthetic polynucleotide

SEQ ID NO: 12371 - DNA, 1141 bp, Artificial Sequence; identical to SEQ ID NO: 11338
  Description of Artificial Sequence: Synthetic polynucleotide

SEQ ID NO: 12372 - DNA, 1819 bp, Artificial Sequence; identical to SEQ ID NO: 11339
  Description of Artificial Sequence: Synthetic polynucleotide

SEQ ID NO: 12373 - DNA, 1813 bp, Artificial Sequence; identical to SEQ ID NO: 11340
  Description of Artificial Sequence: Synthetic polynucleotide

SEQ ID NO: 12374 - DNA, 1872 bp, Artificial Sequence; identical to SEQ ID NO: 11341
  Description of Artificial Sequence: Synthetic polynucleotide

SEQ ID NO: 12375 - DNA, 652 bp, Artificial Sequence; identical to SEQ ID NO: 11342
  Description of Artificial Sequence: Synthetic polynucleotide

SEQ ID NO: 12376 - DNA, 722 bp, Artificial Sequence; identical to SEQ ID NO: 11343
  Description of Artificial Sequence: Synthetic polynucleotide

SEQ ID NO: 12377 - DNA, 858 bp, Artificial Sequence; identical to SEQ ID NO: 11344
  Description of Artificial Sequence: Synthetic polynucleotide

SEQ ID NO: 12378 - DNA, 598 bp, Artificial Sequence; identical to SEQ ID NO: 11345
  Description of Artificial Sequence: Synthetic polynucleotide

SEQ ID NO: 12379 - DNA, 1281 bp, Artificial Sequence; identical to SEQ ID NO: 11346
  Description of Artificial Sequence: Synthetic polynucleotide

SEQ ID NO: 12380 - DNA, 1788 bp, Artificial Sequence; identical to SEQ ID NO: 11347
  Description of Artificial Sequence: Synthetic polynucleotide

SEQ ID NO: 12381 - DNA, 626 bp, Artificial Sequence; identical to SEQ ID NO: 11348
  Description of Artificial Sequence: Synthetic polynucleotide

SEQ ID NO: 12382 - DNA, 1037 bp, Artificial Sequence; identical to SEQ ID NO: 11349
  Description of Artificial Sequence: Synthetic polynucleotide

SEQ ID NO: 12383 - DNA, 977 bp, Artificial Sequence; identical to SEQ ID NO: 11350
  Description of Artificial Sequence: Synthetic polynucleotide

SEQ ID NO: 12384 - DNA, 6206 bp, Artificial Sequence; identical to SEQ ID NO: 11351
  Description of Artificial Sequence: Synthetic polynucleotide

SEQ ID NO: 12385 - DNA, 574 bp, Artificial Sequence; identical to SEQ ID NO: 11352
  Description of Artificial Sequence: Synthetic polynucleotide

SEQ ID NO: 12386 - DNA, 3438 bp, Artificial Sequence; identical to SEQ ID NO: 11353
  Description of Artificial Sequence: Synthetic polynucleotide

SEQ ID NO: 12387 - DNA, 4088 bp, Artificial Sequence; identical to SEQ ID NO: 11354
  Description of Artificial Sequence: Synthetic polynucleotide

SEQ ID NO: 12388 - DNA, 522 bp, Artificial Sequence; identical to SEQ ID NO: 11355
  Description of Artificial Sequence: Synthetic polynucleotide

SEQ ID NO: 12389 - DNA, 2260 bp, Artificial Sequence; identical to SEQ ID NO: 11356
  Description of Artificial Sequence: Synthetic polynucleotide

SEQ ID NO: 12390 - DNA, 1502 bp, Artificial Sequence; identical to SEQ ID NO: 11357
  Description of Artificial Sequence: Synthetic polynucleotide

SEQ ID NO: 12391 - DNA, 510 bp, Artificial Sequence; identical to SEQ ID NO: 11358
  Description of Artificial Sequence: Synthetic polynucleotide

SEQ ID NO: 12392 - DNA, 940 bp, Artificial Sequence; identical to SEQ ID NO: 11359
  Description of Artificial Sequence: Synthetic polynucleotide

SEQ ID NO: 12393 - DNA, 2718 bp, Artificial Sequence; identical to SEQ ID NO: 11360
  Description of Artificial Sequence: Synthetic polynucleotide

SEQ ID NO: 12394 - DNA, 2661 bp, Artificial Sequence; identical to SEQ ID NO: 11361
  Description of Artificial Sequence: Synthetic polynucleotide

SEQ ID NO: 12395 - DNA, 801 bp, Artificial Sequence; identical to SEQ ID NO: 11362
  Description of Artificial Sequence: Synthetic polynucleotide

SEQ ID NO: 12396 - DNA, 311 bp, Artificial Sequence; identical to SEQ ID NO: 11363
  Description of Artificial Sequence: Synthetic polynucleotide

SEQ ID NO: 12397 - DNA, 1048 bp, Artificial Sequence; identical to SEQ ID NO: 11364
  Description of Artificial Sequence: Synthetic polynucleotide

SEQ ID NO: 12398 - DNA, 301 bp, Artificial Sequence; identical to SEQ ID NO: 11365
  Description of Artificial Sequence: Synthetic polynucleotide

SEQ ID NO: 12399 - DNA, 1395 bp, Artificial Sequence; identical to SEQ ID NO: 11366
  Description of Artificial Sequence: Synthetic polynucleotide

SEQ ID NO: 12400 - DNA, 766 bp, Artificial Sequence; identical to SEQ ID NO: 11367
  Description of Artificial Sequence: Synthetic polynucleotide

SEQ ID NO: 12401 - DNA, 691 bp, Artificial Sequence; identical to SEQ ID NO: 11368
  Description of Artificial Sequence: Synthetic polynucleotide

SEQ ID NO: 12402 - DNA, 1024 bp, Artificial Sequence; identical to SEQ ID NO: 11369
  Description of Artificial Sequence: Synthetic polynucleotide

SEQ ID NO: 12403 - DNA, 1339 bp, Artificial Sequence; identical to SEQ ID NO: 11370
  Description of Artificial Sequence: Synthetic polynucleotide

SEQ ID NO: 12404 - DNA, 1376 bp, Artificial Sequence; identical to SEQ ID NO: 11379
  Description of Artificial Sequence: Synthetic polynucleotide

SEQ ID NO: 12405 - DNA, 3843 bp, Artificial Sequence; identical to SEQ ID NO: 11386
  Description of Artificial Sequence: Synthetic polynucleotide

SEQ ID NO: 12406 - DNA, 1622 bp, Artificial Sequence; identical to SEQ ID NO: 11394
  Description of Artificial Sequence: Synthetic polynucleotide

SEQ ID NO: 12407 - DNA, 1441 bp, Artificial Sequence; identical to SEQ ID NO: 11405
  Description of Artificial Sequence: Synthetic polynucleotide

SEQ ID NO: 12408 - DNA, 848 bp, Artificial Sequence; identical to SEQ ID NO: 11414
  Description of Artificial Sequence: Synthetic polynucleotide

SEQ ID NO: 12409 - DNA, 1230 bp, Artificial Sequence; identical to SEQ ID NO: 11415
  Description of Artificial Sequence: Synthetic polynucleotide

SEQ ID NO: 12410 - DNA, 2172 bp, Artificial Sequence; identical to SEQ ID NO: 11430
  Description of Artificial Sequence: Synthetic polynucleotide

SEQ ID NO: 12411 - DNA, 338 bp, Artificial Sequence; identical to SEQ ID NO: 11438
  Description of Artificial Sequence: Synthetic polynucleotide

SEQ ID NO: 12412 - DNA, 5715 bp, Artificial Sequence; identical to SEQ ID NO: 11446
  Description of Artificial Sequence: Synthetic polynucleotide

SEQ ID NO: 12413 - DNA, 1059 bp, Artificial Sequence; identical to SEQ ID NO: 11452
  Description of Artificial Sequence: Synthetic polynucleotide

SEQ ID NO: 12414 - DNA, 1503 bp, Artificial Sequence; identical to SEQ ID NO: 11460
  Description of Artificial Sequence: Synthetic polynucleotide

SEQ ID NO: 12415 - DNA, 1437 bp, Artificial Sequence; identical to SEQ ID NO: 11469
  Description of Artificial Sequence: Synthetic polynucleotide

SEQ ID NO: 12416 - DNA, 1203 bp, Artificial Sequence; identical to SEQ ID NO: 11478
  Description of Artificial Sequence: Synthetic polynucleotide

SEQ ID NO: 12417 - DNA, 206 bp, Artificial Sequence; identical to SEQ ID NO: 11484
  Description of Artificial Sequence: Synthetic polynucleotide

SEQ ID NO: 12418 - DNA, 1141 bp, Artificial Sequence; identical to SEQ ID NO: 11485
  Description of Artificial Sequence: Synthetic polynucleotide

SEQ ID NO: 12419 - DNA, 1819 bp, Artificial Sequence; identical to SEQ ID NO: 11486
  Description of Artificial Sequence: Synthetic polynucleotide

SEQ ID NO: 12420 - DNA, 1813 bp, Artificial Sequence; identical to SEQ ID NO: 11487
  Description of Artificial Sequence: Synthetic polynucleotide

SEQ ID NO: 12421 - DNA, 1872 bp, Artificial Sequence; identical to SEQ ID NO: 11488
  Description of Artificial Sequence: Synthetic polynucleotide

SEQ ID NO: 12422 - DNA, 652 bp, Artificial Sequence; identical to SEQ ID NO: 11489
  Description of Artificial Sequence: Synthetic polynucleotide

SEQ ID NO: 12423 - DNA, 722 bp, Artificial Sequence; identical to SEQ ID NO: 11490
  Description of Artificial Sequence: Synthetic polynucleotide

SEQ ID NO: 12424 - DNA, 858 bp, Artificial Sequence; identical to SEQ ID NO: 11491
  Description of Artificial Sequence: Synthetic polynucleotide

SEQ ID NO: 12425 - DNA, 598 bp, Artificial Sequence; identical to SEQ ID NO: 11492
  Description of Artificial Sequence: Synthetic polynucleotide

SEQ ID NO: 12426 - DNA, 1281 bp, Artificial Sequence; identical to SEQ ID NO: 11493
  Description of Artificial Sequence: Synthetic polynucleotide

SEQ ID NO: 12427 - DNA, 1788 bp, Artificial Sequence; identical to SEQ ID NO: 11494
  Description of Artificial Sequence: Synthetic polynucleotide

SEQ ID NO: 12428 - DNA, 626 bp, Artificial Sequence; identical to SEQ ID NO: 11495
  Description of Artificial Sequence: Synthetic polynucleotide

SEQ ID NO: 12429 - DNA, 1037 bp, Artificial Sequence; identical to SEQ ID NO: 11496
  Description of Artificial Sequence: Synthetic polynucleotide

SEQ ID NO: 12430 - DNA, 977 bp, Artificial Sequence; identical to SEQ ID NO: 11497
  Description of Artificial Sequence: Synthetic polynucleotide

SEQ ID NO: 12431 - DNA, 6206 bp, Artificial Sequence; identical to SEQ ID NO: 11498
  Description of Artificial Sequence: Synthetic polynucleotide

SEQ ID NO: 12432 - DNA, 574 bp, Artificial Sequence; identical to SEQ ID NO: 11499
  Description of Artificial Sequence: Synthetic polynucleotide

SEQ ID NO: 12433 - DNA, 3438 bp, Artificial Sequence; identical to SEQ ID NO: 11500
  Description of Artificial Sequence: Synthetic polynucleotide

SEQ ID NO: 12434 - DNA, 4088 bp, Artificial Sequence; identical to SEQ ID NO: 11501
  Description of Artificial Sequence: Synthetic polynucleotide

SEQ ID NO: 12435 - DNA, 522 bp, Artificial Sequence; identical to SEQ ID NO: 11502
  Description of Artificial Sequence: Synthetic polynucleotide

SEQ ID NO: 12436 - DNA, 2260 bp, Artificial Sequence; identical to SEQ ID NO: 11503
  Description of Artificial Sequence: Synthetic polynucleotide

SEQ ID NO: 12437 - DNA, 1502 bp, Artificial Sequence; identical to SEQ ID NO: 11504
  Description of Artificial Sequence: Synthetic polynucleotide

SEQ ID NO: 12438 - DNA, 510 bp, Artificial Sequence; identical to SEQ ID NO: 11505
  Description of Artificial Sequence: Synthetic polynucleotide

SEQ ID NO: 12439 - DNA, 940 bp, Artificial Sequence; identical to SEQ ID NO: 11506
  Description of Artificial Sequence: Synthetic polynucleotide

SEQ ID NO: 12440 - DNA, 2718 bp, Artificial Sequence; identical to SEQ ID NO: 11507
  Description of Artificial Sequence: Synthetic polynucleotide

SEQ ID NO: 12441 - DNA, 2661 bp, Artificial Sequence; identical to SEQ ID NO: 11508
  Description of Artificial Sequence: Synthetic polynucleotide

SEQ ID NO: 12442 - DNA, 801 bp, Artificial Sequence; identical to SEQ ID NO: 11509
  Description of Artificial Sequence: Synthetic polynucleotide

SEQ ID NO: 12443 - DNA, 311 bp, Artificial Sequence; identical to SEQ ID NO: 11510
  Description of Artificial Sequence: Synthetic polynucleotide

SEQ ID NO: 12444 - DNA, 1048 bp, Artificial Sequence; identical to SEQ ID NO: 11511
  Description of Artificial Sequence: Synthetic polynucleotide

SEQ ID NO: 12445 - DNA, 301 bp, Artificial Sequence; identical to SEQ ID NO: 11512
  Description of Artificial Sequence: Synthetic polynucleotide

SEQ ID NO: 12446 - DNA, 1395 bp, Artificial Sequence; identical to SEQ ID NO: 11513
  Description of Artificial Sequence: Synthetic polynucleotide

SEQ ID NO: 12447 - DNA, 766 bp, Artificial Sequence; identical to SEQ ID NO: 11514
  Description of Artificial Sequence: Synthetic polynucleotide

SEQ ID NO: 12448 - DNA, 691 bp, Artificial Sequence; identical to SEQ ID NO: 11515
  Description of Artificial Sequence: Synthetic polynucleotide

SEQ ID NO: 12449 - DNA, 1024 bp, Artificial Sequence; identical to SEQ ID NO: 11516
  Description of Artificial Sequence: Synthetic polynucleotide

SEQ ID NO: 12450 - DNA, 1339 bp, Artificial Sequence; identical to SEQ ID NO: 11517
  Description of Artificial Sequence: Synthetic polynucleotide

SEQ ID NO: 12451 - DNA, 1376 bp, Artificial Sequence; identical to SEQ ID NO: 11526
  Description of Artificial Sequence: Synthetic polynucleotide

SEQ ID NO: 12452 - DNA, 3843 bp, Artificial Sequence; identical to SEQ ID NO: 11533
  Description of Artificial Sequence: Synthetic polynucleotide

SEQ ID NO: 12453 - DNA, 1622 bp, Artificial Sequence; identical to SEQ ID NO: 11541
  Description of Artificial Sequence: Synthetic polynucleotide

SEQ ID NO: 12454 - DNA, 1441 bp, Artificial Sequence; identical to SEQ ID NO: 11552
  Description of Artificial Sequence: Synthetic polynucleotide

SEQ ID NO: 12455 - DNA, 383 bp, Homo sapiens; identical to SEQ ID NO: 8556

SEQ ID NO: 12456 - DNA, 116 bp, Homo sapiens; identical to SEQ ID NO: 8448

SEQ ID NO: 12457 - DNA, 264 bp, Homo sapiens; identical to SEQ ID NO: 8503

SEQ ID NO: 12458 - DNA, 521 bp, Homo sapiens; identical to SEQ ID NO: 8546

SEQ ID NO: 12459 - DNA, 109 bp, Homo sapiens; identical to SEQ ID NO: 8553

SEQ ID NO: 12460 - DNA, 1041 bp, Homo sapiens; identical to SEQ ID NO: 8562

SEQ ID NO: 12461 - DNA, 383 bp, Homo sapiens; identical to SEQ ID NO: 8742

SEQ ID NO: 12462 - DNA, 116 bp, Homo sapiens; identical to SEQ ID NO: 8634

SEQ ID NO: 12463 - DNA, 264 bp, Homo sapiens; identical to SEQ ID NO: 8689

SEQ ID NO: 12464 - DNA, 521 bp, Homo sapiens; identical to SEQ ID NO: 8732

SEQ ID NO: 12465 - DNA, 109 bp, Homo sapiens; identical to SEQ ID NO: 8739

SEQ ID NO: 12466 - DNA, 1041 bp, Homo sapiens; identical to SEQ ID NO: 8748

SEQ ID NO: 12467 - DNA, 383 bp, Artificial Sequence; identical to SEQ ID NO: 8928
  Description of Artificial Sequence: Synthetic polynucleotide

SEQ ID NO: 12468 - DNA, 116 bp, Artificial Sequence; identical to SEQ ID NO: 8820
  Description of Artificial Sequence: Synthetic polynucleotide

SEQ ID NO: 12469 - DNA, 264 bp, Artificial Sequence; identical to SEQ ID NO: 8875
  Description of Artificial Sequence: Synthetic polynucleotide

SEQ ID NO: 12470 - DNA, 521 bp, Artificial Sequence; identical to SEQ ID NO: 8918
  Description of Artificial Sequence: Synthetic polynucleotide

SEQ ID NO: 12471 - DNA, 109 bp, Artificial Sequence; identical to SEQ ID NO: 8925
  Description of Artificial Sequence: Synthetic polynucleotide

SEQ ID NO: 12472 - DNA, 1041 bp, Artificial Sequence; identical to SEQ ID NO: 8934
  Description of Artificial Sequence: Synthetic polynucleotide

SEQ ID NO: 12473 - DNA, 383 bp, Artificial Sequence; identical to SEQ ID NO: 9114
  Description of Artificial Sequence: Synthetic polynucleotide

SEQ ID NO: 12474 - DNA, 116 bp, Artificial Sequence; identical to SEQ ID NO: 9006
  Description of Artificial Sequence: Synthetic polynucleotide

SEQ ID NO: 12475 - DNA, 264 bp, Artificial Sequence; identical to SEQ ID NO: 9061
  Description of Artificial Sequence: Synthetic polynucleotide

SEQ ID NO: 12476 - DNA, 521 bp, Artificial Sequence; identical to SEQ ID NO: 9104
  Description of Artificial Sequence: Synthetic polynucleotide

SEQ ID NO: 12477 - DNA, 109 bp, Artificial Sequence; identical to SEQ ID NO: 9111
  Description of Artificial Sequence: Synthetic polynucleotide

SEQ ID NO: 12478 - DNA, 1041 bp, Artificial Sequence; identical to SEQ ID NO: 9120
  Description of Artificial Sequence: Synthetic polynucleotide

SEQ ID NO: 12479 - DNA, 383 bp, Artificial Sequence; identical to SEQ ID NO: 9300
  Description of Artificial Sequence: Synthetic polynucleotide

SEQ ID NO: 12480 - DNA, 116 bp, Artificial Sequence; identical to SEQ ID NO: 9192
  Description of Artificial Sequence: Synthetic polynucleotide

SEQ ID NO: 12481 - DNA, 264 bp, Artificial Sequence; identical to SEQ ID NO: 9247
  Description of Artificial Sequence: Synthetic polynucleotide

SEQ ID NO: 12482 - DNA, 521 bp, Artificial Sequence; identical to SEQ ID NO: 9290
  Description of Artificial Sequence: Synthetic polynucleotide

SEQ ID NO: 12483 - DNA, 109 bp, Artificial Sequence; identical to SEQ ID NO: 9297
  Description of Artificial Sequence: Synthetic polynucleotide

SEQ ID NO: 12484 - DNA, 1041 bp, Artificial Sequence; identical to SEQ ID NO: 9306
  Description of Artificial Sequence: Synthetic polynucleotide

SEQ ID NO: 12485 - DNA, 383 bp, Artificial Sequence; identical to SEQ ID NO: 9486
  Description of Artificial Sequence: Synthetic polynucleotide

SEQ ID NO: 12486 - DNA, 116 bp, Artificial Sequence; identical to SEQ ID NO: 9378
  Description of Artificial Sequence: Synthetic polynucleotide

SEQ ID NO: 12487 - DNA, 264 bp, Artificial Sequence; identical to SEQ ID NO: 9433
  Description of Artificial Sequence: Synthetic polynucleotide

SEQ ID NO: 12488 - DNA, 521 bp, Artificial Sequence; identical to SEQ ID NO: 9476
  Description of Artificial Sequence: Synthetic polynucleotide

SEQ ID NO: 12489 - DNA, 109 bp, Artificial Sequence; identical to SEQ ID NO: 9483
  Description of Artificial Sequence: Synthetic polynucleotide

SEQ ID NO: 12490 - DNA, 1041 bp, Artificial Sequence; identical to SEQ ID NO: 9492
  Description of Artificial Sequence: Synthetic polynucleotide

SEQ ID NO: 12491 - DNA, 582 bp, Homo sapiens; identical to SEQ ID NO: 9672

SEQ ID NO: 12492 - DNA, 315 bp, Homo sapiens; identical to SEQ ID NO: 9564

SEQ ID NO: 12493 - DNA, 463 bp, Homo sapiens; identical to SEQ ID NO: 9619

SEQ ID NO: 12494 - DNA, 720 bp, Homo sapiens; identical to SEQ ID NO: 9662

SEQ ID NO: 12495 - DNA, 308 bp, Homo sapiens; identical to SEQ ID NO: 9669

SEQ ID NO: 12496 - DNA, 1240 bp, Homo sapiens; identical to SEQ ID NO: 9678

SEQ ID NO: 12497 - DNA, 582 bp, Homo sapiens; identical to SEQ ID NO: 9858

SEQ ID NO: 12498 - DNA, 315 bp, Homo sapiens; identical to SEQ ID NO: 9750

SEQ ID NO: 12499 - DNA, 463 bp, Homo sapiens; identical to SEQ ID NO: 9805

SEQ ID NO: 12500 - DNA, 720 bp, Homo sapiens; identical to SEQ ID NO: 9848

SEQ ID NO: 12501 - DNA, 308 bp, Homo sapiens; identical to SEQ ID NO: 9855

SEQ ID NO: 12502 - DNA, 1240 bp, Homo sapiens; identical to SEQ ID NO: 9864

SEQ ID NO: 12503 - DNA, 582 bp, Artificial Sequence; identical to SEQ ID NO: 10044
  Description of Artificial Sequence: Synthetic polynucleotide

SEQ ID NO: 12504 - DNA, 315 bp, Artificial Sequence; identical to SEQ ID NO: 9936
  Description of Artificial Sequence: Synthetic polynucleotide

SEQ ID NO: 12505 - DNA, 463 bp, Artificial Sequence; identical to SEQ ID NO: 9991
  Description of Artificial Sequence: Synthetic polynucleotide

SEQ ID NO: 12506 - DNA, 720 bp, Artificial Sequence; identical to SEQ ID NO: 10034
  Description of Artificial Sequence: Synthetic polynucleotide

SEQ ID NO: 12507 - DNA, 308 bp, Artificial Sequence; identical to SEQ ID NO: 10041
  Description of Artificial Sequence: Synthetic polynucleotide

SEQ ID NO: 12508 - DNA, 1240 bp, Artificial Sequence; identical to SEQ ID NO: 10050
  Description of Artificial Sequence: Synthetic polynucleotide

SEQ ID NO: 12509 - DNA, 582 bp, Artificial Sequence; identical to SEQ ID NO: 10230
  Description of Artificial Sequence: Synthetic polynucleotide

SEQ ID NO: 12510 - DNA, 315 bp, Artificial Sequence; identical to SEQ ID NO: 10122
  Description of Artificial Sequence: Synthetic polynucleotide

SEQ ID NO: 12511 - DNA, 463 bp, Artificial Sequence; identical to SEQ ID NO: 10177
  Description of Artificial Sequence: Synthetic polynucleotide

SEQ ID NO: 12512 - DNA, 720 bp, Artificial Sequence; identical to SEQ ID NO: 10220
  Description of Artificial Sequence: Synthetic polynucleotide

SEQ ID NO: 12513 - DNA, 308 bp, Artificial Sequence; identical to SEQ ID NO: 10227
  Description of Artificial Sequence: Synthetic polynucleotide

SEQ ID NO: 12514 - DNA, 1240 bp, Artificial Sequence; identical to SEQ ID NO: 10236
  Description of Artificial Sequence: Synthetic polynucleotide

SEQ ID NO: 12515 - DNA, 582 bp, Artificial Sequence; identical to SEQ ID NO: 10416
  Description of Artificial Sequence: Synthetic polynucleotide

SEQ ID NO: 12516 - DNA, 315 bp, Artificial Sequence; identical to SEQ ID NO: 10308
  Description of Artificial Sequence: Synthetic polynucleotide

SEQ ID NO: 12517 - DNA, 463 bp, Artificial Sequence; identical to SEQ ID NO: 10363
  Description of Artificial Sequence: Synthetic polynucleotide

SEQ ID NO: 12518 - DNA, 720 bp, Artificial Sequence; identical to SEQ ID NO: 10406
  Description of Artificial Sequence: Synthetic polynucleotide

SEQ ID NO: 12519 - DNA, 308 bp, Artificial Sequence; identical to SEQ ID NO: 10413
  Description of Artificial Sequence: Synthetic polynucleotide

SEQ ID NO: 12520 - DNA, 1240 bp, Artificial Sequence; identical to SEQ ID NO: 10422
  Description of Artificial Sequence: Synthetic polynucleotide

SEQ ID NO: 12521 - DNA, 582 bp, Artificial Sequence; identical to SEQ ID NO: 10602
  Description of Artificial Sequence: Synthetic polynucleotide

SEQ ID NO: 12522 - DNA, 315 bp, Artificial Sequence; identical to SEQ ID NO: 10494
  Description of Artificial Sequence: Synthetic polynucleotide

SEQ ID NO: 12523 - DNA, 463 bp, Artificial Sequence; identical to SEQ ID NO: 10549
  Description of Artificial Sequence: Synthetic polynucleotide

SEQ ID NO: 12524 - DNA, 720 bp, Artificial Sequence; identical to SEQ ID NO: 10592
  Description of Artificial Sequence: Synthetic polynucleotide

SEQ ID NO: 12525 - DNA, 308 bp, Artificial Sequence; identical to SEQ ID NO: 10599
  Description of Artificial Sequence: Synthetic polynucleotide

SEQ ID NO: 12526 - DNA, 1240 bp, Artificial Sequence; identical to SEQ ID NO: 10608
  Description of Artificial Sequence: Synthetic polynucleotide

SEQ ID NO: 12527 - DNA, 1788 bp, Homo sapiens; identical to SEQ ID NO: 10759

SEQ ID NO: 12528 - DNA, 1230 bp, Homo sapiens; identical to SEQ ID NO: 10680

SEQ ID NO: 12529 - DNA, 1059 bp, Homo sapiens; identical to SEQ ID NO: 10717

SEQ ID NO: 12530 - DNA, 1819 bp, Homo sapiens; identical to SEQ ID NO: 10751

SEQ ID NO: 12531 - DNA, 598 bp, Homo sapiens; identical to SEQ ID NO: 10757

SEQ ID NO: 12532 - DNA, 3438 bp, Homo sapiens; identical to SEQ ID NO: 10765

SEQ ID NO: 12533 - DNA, 1788 bp, Homo sapiens; identical to SEQ ID NO: 10906

SEQ ID NO: 12534 - DNA, 1230 bp, Homo sapiens; identical to SEQ ID NO: 10827

SEQ ID NO: 12535 - DNA, 1059 bp, Homo sapiens; identical to SEQ ID NO: 10864

SEQ ID NO: 12536 - DNA, 1819 bp, Homo sapiens; identical to SEQ ID NO: 10898

SEQ ID NO: 12537 - DNA, 598 bp, Homo sapiens; identical to SEQ ID NO: 10904

SEQ ID NO: 12538 - DNA, 3438 bp, Homo sapiens; identical to SEQ ID NO: 10912

SEQ ID NO: 12539 - DNA, 1788 bp, Artificial Sequence; identical to SEQ ID NO: 11053
  Description of Artificial Sequence: Synthetic polynucleotide

SEQ ID NO: 12540 - DNA, 1230 bp, Artificial Sequence; identical to SEQ ID NO: 10974
  Description of Artificial Sequence: Synthetic polynucleotide

SEQ ID NO: 12541 - DNA, 1059 bp, Artificial Sequence; identical to SEQ ID NO: 11011
  Description of Artificial Sequence: Synthetic polynucleotide

SEQ ID NO: 12542 - DNA, 1819 bp, Artificial Sequence; identical to SEQ ID NO: 11045
  Description of Artificial Sequence: Synthetic polynucleotide

SEQ ID NO: 12543 - DNA, 598 bp, Artificial Sequence; identical to SEQ ID NO: 11051
  Description of Artificial Sequence: Synthetic polynucleotide

SEQ ID NO: 12544 - DNA, 3438 bp, Artificial Sequence; identical to SEQ ID NO: 11059
  Description of Artificial Sequence: Synthetic polynucleotide

SEQ ID NO: 12545 - DNA, 1788 bp, Artificial Sequence; identical to SEQ ID NO: 11200
  Description of Artificial Sequence: Synthetic polynucleotide

SEQ ID NO: 12546 - DNA, 1230 bp, Artificial Sequence; identical to SEQ ID NO: 11121
  Description of Artificial Sequence: Synthetic polynucleotide

SEQ ID NO: 12547 - DNA, 1059 bp, Artificial Sequence; identical to SEQ ID NO: 11158
  Description of Artificial Sequence: Synthetic polynucleotide

SEQ ID NO: 12548 - DNA, 1819 bp, Artificial Sequence; identical to SEQ ID NO: 11192
  Description of Artificial Sequence: Synthetic polynucleotide

SEQ ID NO: 12549 - DNA, 598 bp, Artificial Sequence; identical to SEQ ID NO: 11198
  Description of Artificial Sequence: Synthetic polynucleotide

SEQ ID NO: 12550 - DNA, 3438 bp, Artificial Sequence; identical to SEQ ID NO: 11206
  Description of Artificial Sequence: Synthetic polynucleotide

SEQ ID NO: 12551 - DNA, 1788 bp, Artificial Sequence; identical to SEQ ID NO: 11347
  Description of Artificial Sequence: Synthetic polynucleotide

SEQ ID NO: 12552 - DNA, 1230 bp, Artificial Sequence; identical to SEQ ID NO: 11268
  Description of Artificial Sequence: Synthetic polynucleotide

SEQ ID NO: 12553 - DNA, 1059 bp, Artificial Sequence; identical to SEQ ID NO: 11305
  Description of Artificial Sequence: Synthetic polynucleotide

SEQ ID NO: 12554 - DNA, 1819 bp, Artificial Sequence; identical to SEQ ID NO: 11339
  Description of Artificial Sequence: Synthetic polynucleotide

SEQ ID NO: 12555 - DNA, 598 bp, Artificial Sequence; identical to SEQ ID NO: 11345
  Description of Artificial Sequence: Synthetic polynucleotide

SEQ ID NO: 12556 - DNA, 3438 bp, Artificial Sequence; identical to SEQ ID NO: 11353
  Description of Artificial Sequence: Synthetic polynucleotide

SEQ ID NO: 12557 - DNA, 1788 bp, Artificial Sequence; identical to SEQ ID NO: 11494
  Description of Artificial Sequence: Synthetic polynucleotide

SEQ ID NO: 12558 - DNA, 1230 bp, Artificial Sequence; identical to SEQ ID NO: 11415
  Description of Artificial Sequence: Synthetic polynucleotide

SEQ ID NO: 12559 - DNA, 1059 bp, Artificial Sequence; identical to SEQ ID NO: 11452
  Description of Artificial Sequence: Synthetic polynucleotide

SEQ ID NO: 12560 - DNA, 1819 bp, Artificial Sequence; identical to SEQ ID NO: 11486
  Description of Artificial Sequence: Synthetic polynucleotide

SEQ ID NO: 12561 - DNA, 598 bp, Artificial Sequence; identical to SEQ ID NO: 11492
  Description of Artificial Sequence: Synthetic polynucleotide

SEQ ID NO: 12562 - DNA, 3438 bp, Artificial Sequence; identical to SEQ ID NO: 11500
  Description of Artificial Sequence: Synthetic polynucleotide

SEQ ID NO: 12563 - DNA, 782 bp, Homo sapiens
gcgcttccgagccacgcagaggcgccccctcccgccggagacgggaaagccccggcgcccccagactgggctccgtttccagctcccggaggggctggggctctcccgcgtgcgccccgcacctgccgggggcccgtacccgccctcgccggggctccagggggcacgacggccgtggcccggcgctcttgggaggggagcgggacatccccgaaggcggcgcgctggaggcggggagcggccggggcgcacggagagggcggggagcccgcgggagggggaggagggggaggagggggaggaggcgcgaggtgggggggagcgcggcgggcggcagggagggagcgggagggaggcaagaaagtagcagaaagtgaggctggcaggcggcggcaaaggagccggcgcgcggcggcggcaggaagtctgtgcccgagaacagcagaaataagagccagggagggaccgcggccgcggcggcggcggcgagagcgaaagaggaaactgcagaggaggaagctgcgccgcagcccgagccgcccggcatccccgccgcctctgcgcccgcgccgcgcccccggcgccccctccccagcgcgcccccggccgctcctccgcgccgcgctcgtcggccatggcccgggagaacggcgagagcagctcctcctggaaaaagcaagctgaagacatcaagaagatcttcgagttcaaagagaccctcggaacgtaagtggggaccggggaggcgagggtggaggtggccgcggcaggggctgcacggg

SEQ ID NO: 12564 - DNA, 615 bp, Homo sapiens
ccgtgactctccctacctccccgactccccaggcttcttacagtgacctcttaccgtgccccactccatgaatcgccagagctattcgtccctaaatttcaaaccttgcgcaatgtcccttcacagacccctccaggtatcacgcagccccgagccccgagccccgccccgggggcctcatcccgccccttcgcgtccgcggctcgttttcccccactgagcgcccagctcccgcagtttccccggccgtcgagcgccgtgggcggggctccagggcggcggcgcctcgcggggagggtcctccgtgctgggggcgaggccacccgaggcagctccccgcccgcccccaaccccgccccgctctcggagcctataaagggaggcgacccgcggcccgcccggctggcatcccccagccgccgccagccccgccgaggggagccagcgccgtctctgaggggcgtccggcgccggagccatgaccctccgccgactcaggaagctgcagcagaaggaggaggcggcggccaccccggaccccgccgcccggactcccgactcggaagtcgcgcccgccgctccggtcccgaccccgggaccccctgccgcagccgc

SEQ ID NO: 12565 - DNA, 763 bp, Homo sapiens
gggaacgagacactgctgagctggaagacttcgcgggccacaggcacagccttcctgctgctggcggcgctgctggggctgcctggcaacggcttcgtggtgtggagcttggcgggctggcggcctgcacgggggcgaccgctggcggccacgcttgtgctgcacctggcgctggccgacggcgcggtgctgctgctcacgccgctctttgtggccttcctgacccggcaggcctggccgctgggccaggcgggctgcaaggcggtgtactacgtgtgcgcgctcagcatgtacgccagcgtgctgctcaccggcctgctcagcctgcagcgctgcctcgcagtcacccgccccttcctggcgcctcggctgcgcagcccggccctggcccgccgcctgctgctggcggtctggctggccgccctgttgctcgccgtcccggccgccgtctaccgccacctgtggagggaccgcgtatgccagctgtgccacccgtcgccggtccacgccgccgcccacctgagcctggagactctgaccgctttcgtgcttcctttcgggctgatgctcggctgctacagcgtgacgctggcacggctgcggggcgcccgctggggctccgggcggcacggggcgcgggtgggccggctggtgagcgccatcgtgcttgccttcggcttgctctgggccccctaccacgcagtcaaccttctgcaggcggtcgcagcgctggctccaccggaaggggccttggcgaagctgg

SEQ ID NO: 12566 - DNA, 1020 bp, Homo sapiens
ttggggcagctccctttctgctcactcactgcctagctccttccttcacaccttccttcggaaacgtctgctcctgacaaggtctacttcctgctctcaggaggcccttattgtggaggaagggaggcgtcgcccgtccctggcttctctgacagccgtgttccatccccgccctgtgccccttctcccggacagtgccttctccagggctcacccaggagggtgcagcggtggcccccggggcggtggtcgtggtgggggtgttagctgcaggggtgccctcggtgggtgggagttggtggcctctcgctggtgccatgggactcgcatgttcgccctgcgcccctcggctcttgagcccacaggccgggatcctgcctgccagccgcgtgcgctgccgtttaacccttgcaggcgcagagcgcgcggcggcggtgacagagaactttgtttggctgcccaaatacagcctcctgcagaaggaccctgcgcccggggaaggggaggaatctcttcccctctgggcgcccgccctcctcgccatggcccggcctccacatccgcccacatctggccgcagcggggcgcccggggggaggggctgaggccgcgtctctcgccgtcccctgggcgcgggccaggcggggaggaggggggcgctccggtcgtgtgcccaggactgtcccccagcggccactcgggccccagccccccaggcctggccttgacaggcgggcggagcagccagtgcgagacagggaggccggtgcgggtgcgggaacctgatccgcccgggaggcgggggcggggcgggggcgcagcgcgcggggaggggccggcgcccgccttcctcccccattcattcagctgagccagggggcctaggggctcctccggcggctagctctgcactgcaggagcgcgggcgcggcgccccagccagcgcgcagggcccgggccccgccgggggcgcttcctcgccgctgccctccgcgcgacccgctgcccaccagccatcat

SEQ ID NO: 12567 - DNA, 608 bp, Homo sapiens
gcgggtcccaccctctctcctgccaggggtagaccctgggaccactcagctcgctctcgcaggccctgagcgtctgacgcctgcgcactgagcgcgggcgggcgggcactcccagaaacctccggggcgctgcaggcgggacaagcaggttccacaggccgagcccacgagcccctcgaggggtgagcggcccgggcctcctggcgttctggccggctagccaagcgctggactacatttcccagaggcacggcgtccggagcgctggactacatttcccagaggcaccgctcccggagcgtagcttcatttccgttagtttgcgagatttggaggcctcgcgtggggagagggccgcgtctgtggaggagcttggctccgcacctgctgggctggcgaacccgaaattgggcttggaacccgggagccagatcttggaccctgaactgcacctctgtcaaggtaggagtgtccgggatgccggagcggacacgcgcggagaaagcgtcgctggggttactcgtgtggccgtgtctccggttttgtgtgcaggctacagcctgcctggtattggcgactgcctgtgcatacacgactggacgtgtgtg

SEQ ID NO: 12568 - DNA, 1539 bp, Homo sapiens
tctggccccatgctcagctccgcggccatcgctgaagcgaggcgcagccgccgctgccgcccgggaaactttgcggccggccggagcgcgccgagccaagcgcgggggggaagagcggagaagagctggggaggcggggagcgagggcgcagcgggccggggccgccggccaagcctttgtctggggacgcggcggcgcgccggagagtcccgaggctgcctgcaccgccccagagctctgggctgtgcccgcgcagggaccgggccgggtagagtcgggcggggtggagaggcaagcggagcgcgcggtggggctgaggggaggcgtggggcgagtgcccgttgctcgctctctagctctcttgctcttacgctctctcgctcgcagccgctcgcagctcggcggtgcagctgtgctggatccggcggcgccgcagccttttatcgcctcctgatgtcactggggtgcgggggcccgggcggcccggtgcgcgggccaatagctgcacggcctccgcggcccagcggcgcagggcggggcgcgcctgacagctcccccgccccccgcgtcagctgactggcggcccgagcggccccggagcggcggaggcctggcggagcgctggagcggagtgggacggccagcctgggcccacccccgtaccctgcaggtcccggcccacgcacgctcgcctggagtgcgcgccccacctctaggccaaatcaccgctttcccctcctcgcgcactctcctccctcagttccctttgcaccccacccccatcccgtgtcacccccaaggaggctcagaatgagcgccgggacaacgcctcctgggccctttgttcccaagcggcccccgcccagtgggcgacgctctgtgtgtcctcgcggcttctggccgtgtgtgtcgtgcgttcctgtttctggagatctgcgcgtatttgtatgttggggagggcgggctcgaggctccgagagttgtgttcagacccaactcttaacctcaggggacctttctcaggccaagcgagggcccctcctggcgggtgcagtcgcagagccctgaggttcgactccactggccccgccgctccccgcgttcaccccaccgcacaatgttcacagtgaaggcgacgggaaaagcagcagcccaaaggctctgaattcctcttccccgccacacgcacggaatcctgagcccccggagcctcggggccgaggccggcccgggacggtgctccgagtagctctccactgctggggagccggccctgtttttgtttgaacgttttgtaacgattaagcagatcccggcgtcagcccgccgcggagaggctcaaacaggcataaagtgcgaccccaagtggccactgtgcgcaaaggcgccgcgaccgcccggcccacggccggaaggcttggacggcgcctcgtacccagccaggtctcccctacctggcccaacccaagccagcccagaacgcatactatgtgtgcaccagagcccaggacaggttcccctcgagcgatgtacaggtc

SEQ ID NO: 12569 - DNA, 782 bp, Artificial Sequence
  Description of Artificial Sequence: Synthetic polynucleotide
gygttttygagttaygtagaggygttttttttygtyggagaygggaaagtttyggygtttttagattgggtttygtttttagttttyggaggggttggggttttttygygtgygtttygtatttgtygggggttygtattygttttygtyggggttttagggggtaygayggtygtggttyggygtttttgggaggggagygggatattttygaaggyggygygttggaggyggggagyggtyggggygtayggagagggyggggagttygygggagggggaggagggggaggagggggaggaggygygaggtgggggggagygyggygggyggtagggagggagygggagggaggtaagaaagtagtagaaagtgaggttggtaggyggyggtaaaggagtyggygygyggyggyggtaggaagtttgtgttygagaatagtagaaataagagttagggagggatygyggtygyggyggyggyggygagagygaaagaggaaattgtagaggaggaagttgygtygtagttygagtygttyggtattttygtygtttttgygttygygtygygttttyggygttttttttttagygygttttyggtygttttttygygtygygttygtyggttatggttygggagaayggygagagtagttttttttggaaaaagtaagttgaagatattaagaagattttygagtttaaagagattttyggaaygtaagtggggatyggggaggygagggtggaggtggtygyggtaggggttgtayggg

SEQ ID NO: 12570 - DNA, 615 bp, Artificial Sequence
  Description of Artificial Sequence: Synthetic polynucleotide
tygtgattttttttattttttygattttttaggttttttatagtgattttttatygtgttttattttatgaatygttagagttattygtttttaaattttaaattttgygtaatgtttttttatagatttttttaggtattaygtagtttygagtttygagtttygtttygggggttttatttygttttttygygttygyggttygtttttttttattgagygtttagttttygtagttttttyggtygtygagygtygtgggyggggttttagggyggyggygtttygyggggagggtttttygtgttgggggygaggttattygaggtagtttttygttygtttttaatttygtttygttttyggagtttataaagggaggygattygyggttygttyggttggtattttttagtygtygttagtttygtygaggggagttagygtygtttttgaggggygttyggygtyggagttatgatttttygtygatttaggaagttgtagtagaaggaggaggyggyggttatttyggatttygtygttyggattttygattyggaagtygygttygtygtttyggtttygatttygggattttttgtygtagtygt

SEQ ID NO: 12571 - DNA, 763 bp, Artificial Sequence
  Description of Artificial Sequence: Synthetic polynucleotide
gggaaygagatattgttgagttggaagatttygygggttataggtatagtttttttgttgttggyggygttgttggggttgtttggtaayggtttygtggtgtggagtttggygggttggyggtttgtaygggggygatygttggyggttaygtttgtgttgtatttggygttggtygayggygyggtgttgttgtttaygtygttttttgtggtttttttgattyggtaggtttggtygttgggttaggygggttgtaaggyggtgtattaygtgtgygygtttagtatgtaygttagygtgttgtttatyggtttgtttagtttgtagygttgtttygtagttattygtttttttttggygtttyggttgygtagttyggttttggttygtygtttgttgttggyggtttggttggtygttttgttgttygtygtttyggtygtygtttatygttatttgtggagggatygygtatgttagttgtgttattygtygtyggtttaygtygtygtttatttgagtttggagattttgatygttttygtgttttttttygggttgatgttyggttgttatagygtgaygttggtayggttgyggggygttygttggggtttygggyggtayggggygygggtgggtyggttggtgagygttatygtgtttgttttyggtttgttttgggttttttattaygtagttaattttttgtaggyggtygtagygttggttttatyggaaggggttttggygaagttgg

SEQ ID NO: 12572 - DNA, 1020 bp, Artificial Sequence
  Description of Artificial Sequence: Synthetic polynucleotide
ttggggtagttttttttttgtttatttattgtttagtttttttttttatattttttttyggaaaygtttgtttttgataaggtttattttttgtttttaggaggtttttattgtggaggaagggaggygtygttygtttttggtttttttgatagtygtgttttattttygttttgtgttttttttttyggatagtgttttttttagggtttatttaggagggtgtagyggtggttttyggggyggtggtygtggtgggggtgttagttgtaggggtgttttyggtgggtgggagttggtggtttttygttggtgttatgggattygtatgttygttttgygtttttyggtttttgagtttataggtygggattttgtttgttagtygygtgygttgtygtttaatttttgtaggygtagagygygyggyggyggtgatagagaattttgtttggttgtttaaatatagttttttgtagaaggattttgygttyggggaaggggaggaatttttttttttttgggygttygtttttttygttatggttyggtttttatattygtttatatttggtygtagyggggygttyggggggaggggttgaggtygygtttttygtygttttttgggygygggttaggyggggaggaggggggygtttyggtygtgtgtttaggattgttttttagyggttattygggttttagttttttaggtttggttttgataggygggyggagtagttagtgygagatagggaggtyggtgygggtgygggaatttgattygttygggaggygggggyggggygggggygtagygygyggggaggggtyggygttygttttttttttttatttatttagttgagttagggggtttaggggttttttyggyggttagttttgtattgtaggagygygggygyggygttttagttagygygtagggttygggtttygtygggggygttttttygtygttgtttttygygygattygttgtttattagttattat

SEQ ID NO: 12573 - DNA, 608 bp, Artificial Sequence
  Description of Artificial Sequence: Synthetic polynucleotide
gygggttttatttttttttttgttaggggtagattttgggattatttagttygttttygtaggttttgagygtttgaygtttgygtattgagygygggygggygggtatttttagaaattttyggggygttgtaggygggataagtaggttttataggtygagtttaygagtttttygaggggtgagyggttygggttttttggygttttggtyggttagttaagygttggattatattttttagaggtayggygttyggagygttggattatattttttagaggtatygttttyggagygtagttttattttygttagtttgygagatttggaggtttygygtggggagagggtygygtttgtggaggagtttggtttygtatttgttgggttggygaattygaaattgggtttggaattygggagttagattttggattttgaattgtatttttgttaaggtaggagtgttygggatgtyggagyggataygygyggagaaagygtygttggggttattygtgtggtygtgttttyggttttgtgtgtaggttatagtttgtttggtattggygattgtttgtgtatataygattggaygtgtgtg

SEQ ID NO: 12574 - DNA, 1539 bp, Artificial Sequence
  Description of Artificial Sequence: Synthetic polynucleotide
tttggttttatgtttagtttygyggttatygttgaagygaggygtagtygtygttgtygttygggaaattttgyggtyggtyggagygygtygagttaagygygggggggaagagyggagaagagttggggaggyggggagygagggygtagygggtyggggtygtyggttaagtttttgtttggggaygyggyggygygtyggagagtttygaggttgtttgtatygttttagagttttgggttgtgttygygtagggatygggtygggtagagtygggyggggtggagaggtaagyggagygygyggtggggttgaggggaggygtggggygagtgttygttgttygttttttagtttttttgtttttaygttttttygttygtagtygttygtagttyggyggtgtagttgtgttggattyggyggygtygtagttttttatygttttttgatgttattggggtgygggggttygggyggttyggtgygygggttaatagttgtayggttttygyggtttagyggygtagggyggggygygtttgatagttttttygtttttygygttagttgattggyggttygagyggtttyggagyggyggaggtttggyggagygttggagyggagtgggayggttagtttgggtttattttygtattttgtaggtttyggtttaygtaygttygtttggagtgygygttttatttttaggttaaattatygttttttttttttygygtattttttttttttagttttttttgtattttatttttatttygtgttatttttaaggaggtttagaatgagygtygggataaygttttttgggttttttgtttttaagyggttttygtttagtgggygaygttttgtgtgttttygyggtttttggtygtgtgtgtygtgygtttttgtttttggagatttgygygtatttgtatgttggggagggygggttygaggtttygagagttgtgtttagatttaatttttaattttaggggattttttttaggttaagygagggttttttttggygggtgtagtygtagagttttgaggttygattttattggtttygtygtttttygygtttattttatygtataatgtttatagtgaaggygaygggaaaagtagtagtttaaaggttttgaatttttttttttygttataygtayggaattttgagttttyggagtttyggggtygaggtyggttygggayggtgtttygagtagttttttattgttggggagtyggttttgtttttgtttgaaygttttgtaaygattaagtagatttyggygttagttygtygyggagaggtttaaataggtataaagtgygattttaagtggttattgtgygtaaaggygtygygatygttyggtttayggtyggaaggtttggayggygtttygtatttagttaggttttttttatttggtttaatttaagttagtttagaaygtatattatgtgtgtattagagtttaggataggtttttttygagygatgtataggtt

SEQ ID NO: 12575 - DNA, 782 bp, Artificial Sequence
  Description of Artificial Sequence: Synthetic polynucleotide
gcgttttcgagttacgtagaggcgttttttttcgtcggagacgggaaagtttcggcgtttttagattgggtttcgtttttagttttcggaggggttggggttttttcgcgtgcgtttcgtatttgtcgggggttcgtattcgttttcgtcggggttttagggggtacgacggtcgtggttcggcgtttttgggaggggagcgggatattttcgaaggcggcgcgttggaggcggggagcggtcggggcgtacggagagggcggggagttcgcgggagggggaggagggggaggagggggaggaggcgcgaggtgggggggagcgcggcgggcggtagggagggagcgggagggaggtaagaaagtagtagaaagtgaggttggtaggcggcggtaaaggagtcggcgcgcggcggcggtaggaagtttgtgttcgagaatagtagaaataagagttagggagggatcgcggtcgcggcggcggcggcgagagcgaaagaggaaattgtagaggaggaagttgcgtcgtagttcgagtcgttcggtattttcgtcgtttttgcgttcgcgtcgcgttttcggcgttttttttttagcgcgttttcggtcgttttttcgcgtcgcgttcgtcggttatggttcgggagaacggcgagagtagttttttttggaaaaagtaagttgaagatattaagaagattttcgagtttaaagagattttcggaacgtaagtggggatcggggaggcgagggtggaggtggtcgcggtaggggttgtacggg

SEQ ID NO: 12576 - DNA, 615 bp, Artificial Sequence
  Description of Artificial Sequence: Synthetic polynucleotide
tcgtgattttttttattttttcgattttttaggttttttatagtgattttttatcgtgttttattttatgaatcgttagagttattcgtttttaaattttaaattttgcgtaatgtttttttatagatttttttaggtattacgtagtttcgagtttcgagtttcgtttcgggggttttatttcgttttttcgcgttcgcggttcgtttttttttattgagcgtttagttttcgtagttttttcggtcgtcgagcgtcgtgggcggggttttagggcggcggcgtttcgcggggagggtttttcgtgttgggggcgaggttattcgaggtagtttttcgttcgtttttaatttcgtttcgttttcggagtttataaagggaggcgattcgcggttcgttcggttggtattttttagtcgtcgttagtttcgtcgaggggagttagcgtcgtttttgaggggcgttcggcgtcggagttatgatttttcgtcgatttaggaagttgtagtagaaggaggaggcggcggttatttcggatttcgtcgttcggattttcgattcggaagtcgcgttcgtcgtttcggtttcgatttcgggattttttgtcgtagtcgt

SEQ ID NO: 12577 - DNA, 763 bp, Artificial Sequence
  Description of Artificial Sequence: Synthetic polynucleotide
gggaacgagatattgttgagttggaagatttcgcgggttataggtatagtttttttgttgttggcggcgttgttggggttgtttggtaacggtttcgtggtgtggagtttggcgggttggcggtttgtacgggggcgatcgttggcggttacgtttgtgttgtatttggcgttggtcgacggcgcggtgttgttgtttacgtcgttttttgtggtttttttgattcggtaggtttggtcgttgggttaggcgggttgtaaggcggtgtattacgtgtgcgcgtttagtatgtacgttagcgtgttgtttatcggtttgtttagtttgtagcgttgtttcgtagttattcgtttttttttggcgtttcggttgcgtagttcggttttggttcgtcgtttgttgttggcggtttggttggtcgttttgttgttcgtcgtttcggtcgtcgtttatcgttatttgtggagggatcgcgtatgttagttgtgttattcgtcgtcggtttacgtcgtcgtttatttgagtttggagattttgatcgttttcgtgttttttttcgggttgatgttcggttgttatagcgtgacgttggtacggttgcggggcgttcgttggggtttcgggcggtacggggcgcgggtgggtcggttggtgagcgttatcgtgtttgttttcggtttgttttgggttttttattacgtagttaattttttgtaggcggtcgtagcgttggttttatcggaaggggttttggcgaagttgg

SEQ ID NO: 12578 - DNA, 1020 bp, Artificial Sequence
  Description of Artificial Sequence: Synthetic polynucleotide
ttggggtagttttttttttgtttatttattgtttagtttttttttttatattttttttcggaaacgtttgtttttgataaggtttattttttgtttttaggaggtttttattgtggaggaagggaggcgtcgttcgtttttggtttttttgatagtcgtgttttattttcgttttgtgttttttttttcggatagtgttttttttagggtttatttaggagggtgtagcggtggttttcggggcggtggtcgtggtgggggtgttagttgtaggggtgttttcggtgggtgggagttggtggtttttcgttggtgttatgggattcgtatgttcgttttgcgtttttcggtttttgagtttataggtcgggattttgtttgttagtcgcgtgcgttgtcgtttaatttttgtaggcgtagagcgcgcggcggcggtgatagagaattttgtttggttgtttaaatatagttttttgtagaaggattttgcgttcggggaaggggaggaatttttttttttttgggcgttcgtttttttcgttatggttcggtttttatattcgtttatatttggtcgtagcggggcgttcggggggaggggttgaggtcgcgtttttcgtcgttttttgggcgcgggttaggcggggaggaggggggcgtttcggtcgtgtgtttaggattgttttttagcggttattcgggttttagttttttaggtttggttttgataggcgggcggagtagttagtgcgagatagggaggtcggtgcgggtgcgggaatttgattcgttcgggaggcgggggcggggcgggggcgtagcgcgcggggaggggtcggcgttcgttttttttttttatttatttagttgagttagggggtttaggggttttttcggcggttagttttgtattgtaggagcgcgggcgcggcgttttagttagcgcgtagggttcgggtttcgtcgggggcgttttttcgtcgttgtttttcgcgcgattcgttgtttattagttattat

SEQ ID NO: 12579 - DNA, 608 bp, Artificial Sequence
  Description of Artificial Sequence: Synthetic polynucleotide
gcgggttttatttttttttttgttaggggtagattttgggattatttagttcgttttcgtaggttttgagcgtttgacgtttgcgtattgagcgcgggcgggcgggtatttttagaaattttcggggcgttgtaggcgggataagtaggttttataggtcgagtttacgagtttttcgaggggtgagcggttcgggttttttggcgttttggtcggttagttaagcgttggattatattttttagaggtacggcgttcggagcgttggattatattttttagaggtatcgttttcggagcgtagttttattttcgttagtttgcgagatttggaggtttcgcgtggggagagggtcgcgtttgtggaggagtttggtttcgtatttgttgggttggcgaattcgaaattgggtttggaattcgggagttagattttggattttgaattgtatttttgttaaggtaggagtgttcgggatgtcggagcggatacgcgcggagaaagcgtcgttggggttattcgtgtggtcgtgttttcggttttgtgtgtaggttatagtttgtttggtattggcgattgtttgtgtatatacgattggacgtgtgtg

SEQ ID NO: 12580 - DNA, 1539 bp, Artificial Sequence
  Description of Artificial Sequence: Synthetic polynucleotide
tttggttttatgtttagtttcgcggttatcgttgaagcgaggcgtagtcgtcgttgtcgttcgggaaattttgcggtcggtcggagcgcgtcgagttaagcgcgggggggaagagcggagaagagttggggaggcggggagcgagggcgtagcgggtcggggtcgtcggttaagtttttgtttggggacgcggcggcgcgtcggagagtttcgaggttgtttgtatcgttttagagttttgggttgtgttcgcgtagggatcgggtcgggtagagtcgggcggggtggagaggtaagcggagcgcgcggtggggttgaggggaggcgtggggcgagtgttcgttgttcgttttttagtttttttgtttttacgttttttcgttcgtagtcgttcgtagttcggcggtgtagttgtgttggattcggcggcgtcgtagttttttatcgttttttgatgttattggggtgcgggggttcgggcggttcggtgcgcgggttaatagttgtacggttttcgcggtttagcggcgtagggcggggcgcgtttgatagttttttcgtttttcgcgttagttgattggcggttcgagcggtttcggagcggcggaggtttggcggagcgttggagcggagtgggacggttagtttgggtttattttcgtattttgtaggtttcggtttacgtacgttcgtttggagtgcgcgttttatttttaggttaaattatcgttttttttttttcgcgtattttttttttttagttttttttgtattttatttttatttcgtgttatttttaaggaggtttagaatgagcgtcgggataacgttttttgggttttttgtttttaagcggttttcgtttagtgggcgacgttttgtgtgttttcgcggtttttggtcgtgtgtgtcgtgcgtttttgtttttggagatttgcgcgtatttgtatgttggggagggcgggttcgaggtttcgagagttgtgtttagatttaatttttaattttaggggattttttttaggttaagcgagggttttttttggcgggtgtagtcgtagagttttgaggttcgattttattggtttcgtcgtttttcgcgtttattttatcgtataatgtttatagtgaaggcgacgggaaaagtagtagtttaaaggttttgaatttttttttttcgttatacgtacggaattttgagttttcggagtttcggggtcgaggtcggttcgggacggtgtttcgagtagttttttattgttggggagtcggttttgtttttgtttgaacgttttgtaacgattaagtagatttcggcgttagttcgtcgcggagaggtttaaataggtataaagtgcgattttaagtggttattgtgcgtaaaggcgtcgcgatcgttcggtttacggtcggaaggtttggacggcgtttcgtatttagttaggttttttttatttggtttaatttaagttagtttagaacgtatattatgtgtgtattagagtttaggataggtttttttcgagcgatgtataggtt

SEQ ID NO: 12581 - DNA, 782 bp, Homo sapiens
cccgtgcagcccctgccgcggccacctccaccctcgcctccccggtccccacttacgttccgagggtctctttgaactcgaagatcttcttgatgtcttcagcttgctttttccaggaggagctgctctcgccgttctcccgggccatggccgacgagcgcggcgcggaggagcggccgggggcgcgctggggagggggcgccgggggcgcggcgcgggcgcagaggcggcggggatgccgggcggctcgggctgcggcgcagcttcctcctctgcagtttcctctttcgctctcgccgccgccgccgcggccgcggtccctccctggctcttatttctgctgttctcgggcacagacttcctgccgccgccgcgcgccggctcctttgccgccgcctgccagcctcactttctgctactttcttgcctccctcccgctccctccctgccgcccgccgcgctcccccccacctcgcgcctcctccccctcctccccctcctccccctcccgcgggctccccgccctctccgtgcgccccggccgctccccgcctccagcgcgccgccttcggggatgtcccgctcccctcccaagagcgccgggccacggccgtcgtgccccctggagccccggcgagggcgggtacgggcccccggcaggtgcggggcgcacgcgggagagccccagcccctccgggagctggaaacggagcccagtctgggggcgccggggctttcccgtctccggcgggagggggcgcctctgcgtggctcggaagcgc

SEQ ID NO: 12582 - DNA, 615 bp, Homo sapiens
gcggctgcggcagggggtcccggggtcgggaccggagcggcgggcgcgacttccgagtcgggagtccgggcggcggggtccggggtggccgccgcctcctccttctgctgcagcttcctgagtcggcggagggtcatggctccggcgccggacgcccctcagagacggcgctggctcccctcggcggggctggcggcggctgggggatgccagccgggcgggccgcgggtcgcctccctttataggctccgagagcggggcggggttgggggcgggcggggagctgcctcgggtggcctcgcccccagcacggaggaccctccccgcgaggcgccgccgccctggagccccgcccacggcgctcgacggccggggaaactgcgggagctgggcgctcagtgggggaaaacgagccgcggacgcgaaggggcgggatgaggcccccggggcggggctcggggctcggggctgcgtgatacctggaggggtctgtgaagggacattgcgcaaggtttgaaatttagggacgaatagctctggcgattcatggagtggggcacggtaagaggtcactgtaagaagcctggggagtcggggaggtagggagagtcacgg

SEQ ID NO: 12583 - DNA, 763 bp, Homo sapiens
ccagcttcgccaaggccccttccggtggagccagcgctgcgaccgcctgcagaaggttgactgcgtggtagggggcccagagcaagccgaaggcaagcacgatggcgctcaccagccggcccacccgcgccccgtgccgcccggagccccagcgggcgccccgcagccgtgccagcgtcacgctgtagcagccgagcatcagcccgaaaggaagcacgaaagcggtcagagtctccaggctcaggtgggcggcggcgtggaccggcgacgggtggcacagctggcatacgcggtccctccacaggtggcggtagacggcggccgggacggcgagcaacagggcggccagccagaccgccagcagcaggcggcgggccagggccgggctgcgcagccgaggcgccaggaaggggcgggtgactgcgaggcagcgctgcaggctgagcaggccggtgagcagcacgctggcgtacatgctgagcgcgcacacgtagtacaccgccttgcagcccgcctggcccagcggccaggcctgccgggtcaggaaggccacaaagagcggcgtgagcagcagcaccgcgccgtcggccagcgccaggtgcagcacaagcgtggccgccagcggtcgcccccgtgcaggccgccagcccgccaagctccacaccacgaagccgttgccaggcagccccagcagcgccgccagcagcaggaaggctgtgcctgtggcccgcgaagtcttccagctcagcagtgtctcgttccc

SEQ ID NO: 12584 - DNA, 1020 bp, Homo sapiens
atgatggctggtgggcagcgggtcgcgcggagggcagcggcgaggaagcgcccccggcggggcccgggccctgcgcgctggctggggcgccgcgcccgcgctcctgcagtgcagagctagccgccggaggagcccctaggccccctggctcagctgaatgaatgggggaggaaggcgggcgccggcccctccccgcgcgctgcgcccccgccccgcccccgcctcccgggcggatcaggttcccgcacccgcaccggcctccctgtctcgcactggctgctccgcccgcctgtcaaggccaggcctggggggctggggcccgagtggccgctgggggacagtcctgggcacacgaccggagcgcccccctcctccccgcctggcccgcgcccaggggacggcgagagacgcggcctcagcccctccccccgggcgccccgctgcggccagatgtgggcggatgtggaggccgggccatggcgaggagggcgggcgcccagaggggaagagattcctccccttccccgggcgcagggtccttctgcaggaggctgtatttgggcagccaaacaaagttctctgtcaccgccgccgcgcgctctgcgcctgcaagggttaaacggcagcgcacgcggctggcaggcaggatcccggcctgtgggctcaagagccgaggggcgcagggcgaacatgcgagtcccatggcaccagcgagaggccaccaactcccacccaccgagggcacccctgcagctaacacccccaccacgaccaccgccccgggggccaccgctgcaccctcctgggtgagccctggagaaggcactgtccgggagaaggggcacagggcggggatggaacacggctgtcagagaagccagggacgggcgacgcctcccttcctccacaataagggcctcctgagagcaggaagtagaccttgtcaggagcagacgtttccgaaggaaggtgtgaaggaaggagctaggcagtgagtgagcagaaagggagctgccccaa

SEQ ID NO: 12585 - DNA, 608 bp, Homo sapiens
cacacacgtccagtcgtgtatgcacaggcagtcgccaataccaggcaggctgtagcctgcacacaaaaccggagacacggccacacgagtaaccccagcgacgctttctccgcgcgtgtccgctccggcatcccggacactcctaccttgacagaggtgcagttcagggtccaagatctggctcccgggttccaagcccaatttcgggttcgccagcccagcaggtgcggagccaagctcctccacagacgcggccctctccccacgcgaggcctccaaatctcgcaaactaacggaaatgaagctacgctccgggagcggtgcctctgggaaatgtagtccagcgctccggacgccgtgcctctgggaaatgtagtccagcgcttggctagccggccagaacgccaggaggcccgggccgctcacccctcgaggggctcgtgggctcggcctgtggaacctgcttgtcccgcctgcagcgccccggaggtttctgggagtgcccgcccgcccgcgctcagtgcgcaggcgtcagacgctcagggcctgcgagagcgagctgagtggtcccagggtctacccctggcaggagagagggtgggacccgc

SEQ ID NO: 12586 - DNA, 1539 bp, Homo sapiens
gacctgtacatcgctcgaggggaacctgtcctgggctctggtgcacacatagtatgcgttctgggctggcttgggttgggccaggtaggggagacctggctgggtacgaggcgccgtccaagccttccggccgtgggccgggcggtcgcggcgcctttgcgcacagtggccacttggggtcgcactttatgcctgtttgagcctctccgcggcgggctgacgccgggatctgcttaatcgttacaaaacgttcaaacaaaaacagggccggctccccagcagtggagagctactcggagcaccgtcccgggccggcctcggccccgaggctccgggggctcaggattccgtgcgtgtggcggggaagaggaattcagagcctttgggctgctgcttttcccgtcgccttcactgtgaacattgtgcggtggggtgaacgcggggagcggcggggccagtggagtcgaacctcagggctctgcgactgcacccgccaggaggggccctcgcttggcctgagaaaggtcccctgaggttaagagttgggtctgaacacaactctcggagcctcgagcccgccctccccaacatacaaatacgcgcagatctccagaaacaggaacgcacgacacacacggccagaagccgcgaggacacacagagcgtcgcccactgggcgggggccgcttgggaacaaagggcccaggaggcgttgtcccggcgctcattctgagcctccttgggggtgacacgggatgggggtggggtgcaaagggaactgagggaggagagtgcgcgaggaggggaaagcggtgatttggcctagaggtggggcgcgcactccaggcgagcgtgcgtgggccgggacctgcagggtacgggggtgggcccaggctggccgtcccactccgctccagcgctccgccaggcctccgccgctccggggccgctcgggccgccagtcagctgacgcggggggcgggggagctgtcaggcgcgccccgccctgcgccgctgggccgcggaggccgtgcagctattggcccgcgcaccgggccgcccgggcccccgcaccccagtgacatcaggaggcgataaaaggctgcggcgccgccggatccagcacagctgcaccgccgagctgcgagcggctgcgagcgagagagcgtaagagcaagagagctagagagcgagcaacgggcactcgccccacgcctcccctcagccccaccgcgcgctccgcttgcctctccaccccgcccgactctacccggcccggtccctgcgcgggcacagcccagagctctggggcggtgcaggcagcctcgggactctccggcgcgccgccgcgtccccagacaaaggcttggccggcggccccggcccgctgcgccctcgctccccgcctccccagctcttctccgctcttcccccccgcgcttggctcggcgcgctccggccggccgcaaagtttcccgggcggcagcggcggctgcgcctcgcttcagcgatggccgcggagctgagcatggggccaga

SEQ ID NO: 12587 - DNA, 782 bp, Artificial Sequence
  Description of Artificial Sequence: Synthetic polynucleotide
ttygtgtagtttttgtygyggttatttttattttygttttttyggtttttatttaygtttygagggtttttttgaattygaagatttttttgatgtttttagtttgttttttttaggaggagttgttttygtygttttttygggttatggtygaygagygyggygyggaggagyggtygggggygygttggggagggggygtygggggygyggygygggygtagaggyggyggggatgtygggyggttygggttgyggygtagtttttttttttgtagttttttttttygttttygtygtygtygtygyggtygyggtttttttttggtttttatttttgttgttttygggtatagattttttgtygtygtygygygtyggtttttttgtygtygtttgttagttttattttttgttatttttttgtttttttttygttttttttttgtygttygtygygtttttttttatttygygttttttttttttttttttttttttttttttttygygggtttttygtttttttygtgygtttyggtygtttttygtttttagygygtygttttyggggatgtttygttttttttttaagagygtygggttayggtygtygtgttttttggagtttyggygagggygggtaygggttttyggtaggtgyggggygtaygygggagagttttagttttttygggagttggaaayggagtttagtttgggggygtyggggttttttygttttyggygggagggggygtttttgygtggttyggaagygt

SEQ ID NO: 12588 - DNA, 615 bp, Artificial Sequence
  Description of Artificial Sequence: Synthetic polynucleotide
gyggttgyggtagggggtttyggggtygggatyggagyggygggygygattttygagtygggagttygggyggyggggttyggggtggtygtygttttttttttttgttgtagttttttgagtyggyggagggttatggtttyggygtyggaygttttttagagayggygttggtttttttyggyggggttggyggyggttgggggatgttagtygggygggtygygggtygtttttttttataggtttygagagyggggyggggttgggggygggyggggagttgtttygggtggtttygtttttagtayggaggatttttttygygaggygtygtygttttggagtttygtttayggygttygayggtyggggaaattgygggagttgggygtttagtgggggaaaaygagtygyggaygygaaggggygggatgaggttttyggggyggggttyggggttyggggttgygtgatatttggaggggtttgtgaagggatattgygtaaggtttgaaatttagggaygaatagttttggygatttatggagtggggtayggtaagaggttattgtaagaagtttggggagtyggggaggtagggagagttaygg

SEQ ID NO: 12589 - DNA, 763 bp, Artificial Sequence
  Description of Artificial Sequence: Synthetic polynucleotide
ttagtttygttaaggtttttttyggtggagttagygttgygatygtttgtagaaggttgattgygtggtagggggtttagagtaagtygaaggtaagtaygatggygtttattagtyggtttattygygtttygtgtygttyggagttttagygggygtttygtagtygtgttagygttaygttgtagtagtygagtattagttygaaaggaagtaygaaagyggttagagtttttaggtttaggtgggyggyggygtggatyggygaygggtggtatagttggtataygyggtttttttataggtggyggtagayggyggtygggayggygagtaatagggyggttagttagatygttagtagtaggyggygggttagggtygggttgygtagtygaggygttaggaaggggygggtgattgygaggtagygttgtaggttgagtaggtyggtgagtagtaygttggygtatatgttgagygygtataygtagtatatygttttgtagttygtttggtttagyggttaggtttgtygggttaggaaggttataaagagyggygtgagtagtagtatygygtygtyggttagygttaggtgtagtataagygtggtygttagyggtygttttygtgtaggtygttagttygttaagttttatattaygaagtygttgttaggtagttttagtagygtygttagtagtaggaaggttgtgtttgtggttygygaagttttttagtttagtagtgtttygttttt

SEQ ID NO: 12590 - DNA, 1020 bp, Artificial Sequence
  Description of Artificial Sequence: Synthetic polynucleotide
atgatggttggtgggtagygggtygygyggagggtagyggygaggaagygttttyggyggggttygggttttgygygttggttggggygtygygttygygtttttgtagtgtagagttagtygtyggaggagtttttaggttttttggtttagttgaatgaatgggggaggaaggygggygtyggttttttttygygygttgygttttygtttygttttygtttttygggyggattaggttttygtattygtatyggtttttttgtttygtattggttgtttygttygtttgttaaggttaggtttggggggttggggttygagtggtygttgggggatagttttgggtataygatyggagygtttttttttttttygtttggttygygtttaggggayggygagagaygyggttttagttttttttttygggygtttygttgyggttagatgtgggyggatgtggaggtygggttatggygaggagggygggygtttagaggggaagagattttttttttttttygggygtagggtttttttgtaggaggttgtatttgggtagttaaataaagttttttgttatygtygtygygygttttgygtttgtaagggttaaayggtagygtaygyggttggtaggtaggatttyggtttgtgggtttaagagtygaggggygtagggygaatatgygagttttatggtattagygagaggttattaatttttatttatygagggtatttttgtagttaatatttttattaygattatygtttygggggttatygttgtatttttttgggtgagttttggagaaggtattgttygggagaaggggtatagggyggggatggaatayggttgttagagaagttagggaygggygaygtttttttttttttataataagggttttttgagagtaggaagtagattttgttaggagtagaygttttygaaggaaggtgtgaaggaaggagttaggtagtgagtgagtagaaagggagttgttttaa

SEQ ID NO: 12591 - DNA, 608 bp, Artificial Sequence
  Description of Artificial Sequence: Synthetic polynucleotide
tatataygtttagtygtgtatgtataggtagtygttaatattaggtaggttgtagtttgtatataaaatyggagatayggttataygagtaattttagygaygtttttttygygygtgttygtttyggtatttyggatatttttattttgatagaggtgtagtttagggtttaagatttggttttygggttttaagtttaatttygggttygttagtttagtaggtgyggagttaagtttttttatagaygyggttttttttttaygygaggtttttaaatttygtaaattaayggaaatgaagttaygtttygggagyggtgtttttgggaaatgtagtttagygtttyggaygtygtgtttttgggaaatgtagtttagygtttggttagtyggttagaaygttaggaggttygggtygtttatttttygaggggttygtgggttyggtttgtggaatttgtttgtttygtttgtagygtttyggaggtttttgggagtgttygttygttygygtttagtgygtaggygttagaygtttagggtttgygagagygagttgagtggttttagggtttatttttggtaggagagagggtgggattygt

SEQ ID NO: 12592 - DNA, 1539 bp, Artificial Sequence
  Description of Artificial Sequence: Synthetic polynucleotide
gatttgtatatygttygaggggaatttgttttgggttttggtgtatatatagtatgygttttgggttggtttgggttgggttaggtaggggagatttggttgggtaygaggygtygtttaagtttttyggtygtgggtygggyggtygyggygtttttgygtatagtggttatttggggtygtattttatgtttgtttgagttttttygyggygggttgaygtygggatttgtttaatygttataaaaygtttaaataaaaatagggtyggttttttagtagtggagagttattyggagtatygtttygggtyggtttyggtttygaggtttygggggtttaggatttygtgygtgtggyggggaagaggaatttagagtttttgggttgttgtttttttygtygtttttattgtgaatattgtgyggtggggtgaaygyggggagyggyggggttagtggagtygaattttagggttttgygattgtattygttaggaggggttttygtttggtttgagaaaggttttttgaggttaagagttgggtttgaatataattttyggagtttygagttygttttttttaatatataaataygygtagatttttagaaataggaaygtaygatatatayggttagaagtygygaggatatatagagygtygtttattgggygggggtygtttgggaataaagggtttaggaggygttgtttyggygtttattttgagtttttttgggggtgataygggatgggggtggggtgtaaagggaattgagggaggagagtgygygaggaggggaaagyggtgatttggtttagaggtggggygygtattttaggygagygtgygtgggtygggatttgtagggtaygggggtgggtttaggttggtygttttatttygttttagygtttygttaggttttygtygtttyggggtygttygggtygttagttagttgaygyggggggygggggagttgttaggygygtttygttttgygtygttgggtygyggaggtygtgtagttattggttygygtatygggtygttygggttttygtattttagtgatattaggaggygataaaaggttgyggygtygtyggatttagtatagttgtatygtygagttgygagyggttgygagygagagagygtaagagtaagagagttagagagygagtaaygggtattygttttaygtttttttttagttttatygygygtttygtttgtttttttatttygttygattttattyggttyggtttttgygygggtatagtttagagttttggggyggtgtaggtagtttygggatttttyggygygtygtygygtttttagataaaggtttggtyggyggtttyggttygttgygttttygtttttygtttttttagttttttttygtttttttttttygygtttggttyggygygtttyggtyggtygtaaagtttttygggyggtagyggyggttgygtttygttttagygatggtygyggagttgagtatggggttaga

SEQ ID NO: 12593 - DNA, 782 bp, Artificial Sequence
  Description of Artificial Sequence: Synthetic polynucleotide
ttcgtgtagtttttgtcgcggttatttttattttcgttttttcggtttttatttacgtttcgagggtttttttgaattcgaagatttttttgatgtttttagtttgttttttttaggaggagttgttttcgtcgttttttcgggttatggtcgacgagcgcggcgcggaggagcggtcgggggcgcgttggggagggggcgtcgggggcgcggcgcgggcgtagaggcggcggggatgtcgggcggttcgggttgcggcgtagtttttttttttgtagttttttttttcgttttcgtcgtcgtcgtcgcggtcgcggtttttttttggtttttatttttgttgttttcgggtatagattttttgtcgtcgtcgcgcgtcggtttttttgtcgtcgtttgttagttttattttttgttatttttttgtttttttttcgttttttttttgtcgttcgtcgcgtttttttttatttcgcgttttttttttttttttttttttttttttttttcgcgggtttttcgtttttttcgtgcgtttcggtcgtttttcgtttttagcgcgtcgttttcggggatgtttcgttttttttttaagagcgtcgggttacggtcgtcgtgttttttggagtttcggcgagggcgggtacgggttttcggtaggtgcggggcgtacgcgggagagttttagttttttcgggagttggaaacggagtttagtttgggggcgtcggggttttttcgttttcggcgggagggggcgtttttgcgtggttcggaagcgt

SEQ ID NO: 12594 - DNA, 615 bp, Artificial Sequence
  Description of Artificial Sequence: Synthetic polynucleotide
gcggttgcggtagggggtttcggggtcgggatcggagcggcgggcgcgattttcgagtcgggagttcgggcggcggggttcggggtggtcgtcgttttttttttttgttgtagttttttgagtcggcggagggttatggtttcggcgtcggacgttttttagagacggcgttggtttttttcggcggggttggcggcggttgggggatgttagtcgggcgggtcgcgggtcgtttttttttataggtttcgagagcggggcggggttgggggcgggcggggagttgtttcgggtggtttcgtttttagtacggaggatttttttcgcgaggcgtcgtcgttttggagtttcgtttacggcgttcgacggtcggggaaattgcgggagttgggcgtttagtgggggaaaacgagtcgcggacgcgaaggggcgggatgaggttttcggggcggggttcggggttcggggttgcgtgatatttggaggggtttgtgaagggatattgcgtaaggtttgaaatttagggacgaatagttttggcgatttatggagtggggtacggtaagaggttattgtaagaagtttggggagtcggggaggtagggagagttacgg

SEQ ID NO: 12595 - DNA, 763 bp, Artificial Sequence
  Description of Artificial Sequence: Synthetic polynucleotide
ttagtttcgttaaggtttttttcggtggagttagcgttgcgatcgtttgtagaaggttgattgcgtggtagggggtttagagtaagtcgaaggtaagtacgatggcgtttattagtcggtttattcgcgtttcgtgtcgttcggagttttagcgggcgtttcgtagtcgtgttagcgttacgttgtagtagtcgagtattagttcgaaaggaagtacgaaagcggttagagtttttaggtttaggtgggcggcggcgtggatcggcgacgggtggtatagttggtatacgcggtttttttataggtggcggtagacggcggtcgggacggcgagtaatagggcggttagttagatcgttagtagtaggcggcgggttagggtcgggttgcgtagtcgaggcgttaggaaggggcgggtgattgcgaggtagcgttgtaggttgagtaggtcggtgagtagtacgttggcgtatatgttgagcgcgtatacgtagtatatcgttttgtagttcgtttggtttagcggttaggtttgtcgggttaggaaggttataaagagcggcgtgagtagtagtatcgcgtcgtcggttagcgttaggtgtagtataagcgtggtcgttagcggtcgttttcgtgtaggtcgttagttcgttaagttttatattacgaagtcgttgttaggtagttttagtagcgtcgttagtagtaggaaggttgtgtttgtggttcgcgaagttttttagtttagtagtgtttcgttttt

SEQ ID NO: 12596 - DNA, 1020 bp, Artificial Sequence
  Description of Artificial Sequence: Synthetic polynucleotide
atgatggttggtgggtagcgggtcgcgcggagggtagcggcgaggaagcgttttcggcggggttcgggttttgcgcgttggttggggcgtcgcgttcgcgtttttgtagtgtagagttagtcgtcggaggagtttttaggttttttggtttagttgaatgaatgggggaggaaggcgggcgtcggttttttttcgcgcgttgcgttttcgtttcgttttcgtttttcgggcggattaggttttcgtattcgtatcggtttttttgtttcgtattggttgtttcgttcgtttgttaaggttaggtttggggggttggggttcgagtggtcgttgggggatagttttgggtatacgatcggagcgtttttttttttttcgtttggttcgcgtttaggggacggcgagagacgcggttttagttttttttttcgggcgtttcgttgcggttagatgtgggcggatgtggaggtcgggttatggcgaggagggcgggcgtttagaggggaagagattttttttttttttcgggcgtagggtttttttgtaggaggttgtatttgggtagttaaataaagttttttgttatcgtcgtcgcgcgttttgcgtttgtaagggttaaacggtagcgtacgcggttggtaggtaggatttcggtttgtgggtttaagagtcgaggggcgtagggcgaatatgcgagttttatggtattagcgagaggttattaatttttatttatcgagggtatttttgtagttaatatttttattacgattatcgtttcgggggttatcgttgtatttttttgggtgagttttggagaaggtattgttcgggagaaggggtatagggcggggatggaatacggttgttagagaagttagggacgggcgacgtttttttttttttataataagggttttttgagagtaggaagtagattttgttaggagtagacgttttcgaaggaaggtgtgaaggaaggagttaggtagtgagtgagtagaaagggagttgttttaa

SEQ ID NO: 12597 - DNA, 608 bp, Artificial Sequence
  Description of Artificial Sequence: Synthetic polynucleotide
tatatacgtttagtcgtgtatgtataggtagtcgttaatattaggtaggttgtagtttgtatataaaatcggagatacggttatacgagtaattttagcgacgtttttttcgcgcgtgttcgtttcggtatttcggatatttttattttgatagaggtgtagtttagggtttaagatttggttttcgggttttaagtttaatttcgggttcgttagtttagtaggtgcggagttaagtttttttatagacgcggttttttttttacgcgaggtttttaaatttcgtaaattaacggaaatgaagttacgtttcgggagcggtgtttttgggaaatgtagtttagcgtttcggacgtcgtgtttttgggaaatgtagtttagcgtttggttagtcggttagaacgttaggaggttcgggtcgtttatttttcgaggggttcgtgggttcggtttgtggaatttgtttgtttcgtttgtagcgtttcggaggtttttgggagtgttcgttcgttcgcgtttagtgcgtaggcgttagacgtttagggtttgcgagagcgagttgagtggttttagggtttatttttggtaggagagagggtgggattcgt

SEQ ID NO: 12598 - DNA, 1539 bp, Artificial Sequence
  Description of Artificial Sequence: Synthetic polynucleotide
gatttgtatatcgttcgaggggaatttgttttgggttttggtgtatatatagtatgcgttttgggttggtttgggttgggttaggtaggggagatttggttgggtacgaggcgtcgtttaagtttttcggtcgtgggtcgggcggtcgcggcgtttttgcgtatagtggttatttggggtcgtattttatgtttgtttgagttttttcgcggcgggttgacgtcgggatttgtttaatcgttataaaacgtttaaataaaaatagggtcggttttttagtagtggagagttattcggagtatcgtttcgggtcggtttcggtttcgaggtttcgggggtttaggatttcgtgcgtgtggcggggaagaggaatttagagtttttgggttgttgtttttttcgtcgtttttattgtgaatattgtgcggtggggtgaacgcggggagcggcggggttagtggagtcgaattttagggttttgcgattgtattcgttaggaggggttttcgtttggtttgagaaaggttttttgaggttaagagttgggtttgaatataattttcggagtttcgagttcgttttttttaatatataaatacgcgtagatttttagaaataggaacgtacgatatatacggttagaagtcgcgaggatatatagagcgtcgtttattgggcgggggtcgtttgggaataaagggtttaggaggcgttgtttcggcgtttattttgagtttttttgggggtgatacgggatgggggtggggtgtaaagggaattgagggaggagagtgcgcgaggaggggaaagcggtgatttggtttagaggtggggcgcgtattttaggcgagcgtgcgtgggtcgggatttgtagggtacgggggtgggtttaggttggtcgttttatttcgttttagcgtttcgttaggttttcgtcgtttcggggtcgttcgggtcgttagttagttgacgcggggggcgggggagttgttaggcgcgtttcgttttgcgtcgttgggtcgcggaggtcgtgtagttattggttcgcgtatcgggtcgttcgggttttcgtattttagtgatattaggaggcgataaaaggttgcggcgtcgtcggatttagtatagttgtatcgtcgagttgcgagcggttgcgagcgagagagcgtaagagtaagagagttagagagcgagtaacgggtattcgttttacgtttttttttagttttatcgcgcgtttcgtttgtttttttatttcgttcgattttattcggttcggtttttgcgcgggtatagtttagagttttggggcggtgtaggtagtttcgggatttttcggcgcgtcgtcgcgtttttagataaaggtttggtcggcggtttcggttcgttgcgttttcgtttttcgtttttttagttttttttcgtttttttttttcgcgtttggttcggcgcgtttcggtcggtcgtaaagtttttcgggcggtagcggcggttgcgtttcgttttagcgatggtcgcggagttgagtatggggttaga

SEQ ID NO: 12599 - DNA, 262 bp, Homo sapiens
gaacagcagaaataagagccagggagggaccgcggccgcggcggcggcggcgagagcgaaagaggaaactgcagaggaggaagctgcgccgcagcccgagccgcccggcatccccgccgcctctgcgcccgcgccgcgcccccggcgccccctccccagcgcgcccccggccgctcctccgcgccgcgctcgtcggccatggcccgggagaacggcgagagcagctcctcctggaaaaagcaagctgaagacatcaagaaga

SEQ ID NO: 12600 - DNA, 288 bp, Homo sapiens
aaaccttgcgcaatgtcccttcacagacccctccaggtatcacgcagccccgagccccgagccccgccccgggggcctcatcccgccccttcgcgtccgcggctcgttttcccccactgagcgcccagctcccgcagtttccccggccgtcgagcgccgtgggcggggctccagggcggcggcgcctcgcggggagggtcctccgtgctgggggcgaggccacccgaggcagctccccgcccgcccccaaccccgccccgctctcggagcctataaagggaggcgacc

SEQ ID NO: 12601 - DNA, 235 bp, Homo sapiens
gctcaccggcctgctcagcctgcagcgctgcctcgcagtcacccgccccttcctggcgcctcggctgcgcagcccggccctggcccgccgcctgctgctggcggtctggctggccgccctgttgctcgccgtcccggccgccgtctaccgccacctgtggagggaccgcgtatgccagctgtgccacccgtcgccggtccacgccgccgcccacctgagcctggagactctgacc

SEQ ID NO: 12602 - DNA, 273 bp, Homo sapiens
ctccagggctcacccaggagggtgcagcggtggcccccggggcggtggtcgtggtgggggtgttagctgcaggggtgccctcggtgggtgggagttggtggcctctcgctggtgccatgggactcgcatgttcgccctgcgcccctcggctcttgagcccacaggccgggatcctgcctgccagccgcgtgcgctgccgtttaacccttgcaggcgcagagcgcgcggcggcggtgacagagaactttgtttggctgcccaaatacagcctcc

SEQ ID NO: 12603 - DNA, 257 bp, Homo sapiens
gctgcaggcgggacaagcaggttccacaggccgagcccacgagcccctcgaggggtgagcggcccgggcctcctggcgttctggccggctagccaagcgctggactacatttcccagaggcacggcgtccggagcgctggactacatttcccagaggcaccgctcccggagcgtagcttcatttccgttagtttgcgagatttggaggcctcgcgtggggagagggccgcgtctgtggaggagcttggctccgcacc

SEQ ID NO: 12604 - DNA, 254 bp, Homo sapiens
cctgcaccgccccagagctctgggctgtgcccgcgcagggaccgggccgggtagagtcgggcggggtggagaggcaagcggagcgcgcggtggggctgaggggaggcgtggggcgagtgcccgttgctcgctctctagctctcttgctcttacgctctctcgctcgcagccgctcgcagctcggcggtgcagctgtgctggatccggcggcgccgcagccttttatcgcctcctgatgtcactggggtgcgggg

SEQ ID NO: 12605 - DNA, 262 bp, Artificial Sequence
  Description of Artificial Sequence: Synthetic polynucleotide
gaacagcagaaataagagccagggagggacygyggtygyggyggyggyggygagagygaaagaggaaattgtagaggaggaagttgygtygtagttygagtygttyggtattttygtygtttttgygttygygtygygttttyggygttttttttttagygygttttyggtygttttttygygtygygttygtyggttatggttygggagaayggygagagtagttttttttggaaaaagtaagttgaagatattaagaaga

SEQ ID NO: 12606 - DNA, 288 bp, Artificial Sequence
  Description of Artificial Sequence: Synthetic polynucleotide
aaattttgygtaatgtttttttatagatttttttaggtattaygtagtttygagtttygagtttygtttygggggttttatttygttttttygygttygyggttygtttttttttattgagygtttagttttygtagttttttyggtygtygagygtygtgggyggggttttagggyggyggygtttygyggggagggtttttygtgttgggggygaggttattygaggtagtttttygttygtttttaatttygtttygttttyggagtttataaagggaggygatt

SEQ ID NO: 12607 - DNA, 235 bp, Artificial Sequence
  Description of Artificial Sequence: Synthetic polynucleotide
gtttatyggtttgtttagtttgtagygttgtttygtagttattygtttttttttggygtttyggttgygtagttyggttttggttygtygtttgttgttggyggtttggttggtygttttgttgttygtygtttyggtygtygtttatygttatttgtggagggatygygtatgttagttgtgttattygtygtyggtttaygtygtygtttatttgagtttggagattttgatt

SEQ ID NO: 12608 - DNA, 273 bp, Artificial Sequence
  Description of Artificial Sequence: Synthetic polynucleotide
ttttagggtttatttaggagggtgtagyggtggttttyggggyggtggtygtggtgggggtgttagttgtaggggtgttttyggtgggtgggagttggtggtttttygttggtgttatgggattygtatgttygttttgygtttttyggtttttgagtttataggtygggattttgtttgttagtygygtgygttgtygtttaatttttgtaggygtagagygygyggyggyggtgatagagaattttgtttggttgtttaaatatagttttt

SEQ ID NO: 12609 - DNA, 257 bp, Artificial Sequence
  Description of Artificial Sequence: Synthetic polynucleotide
gttgtaggygggataagtaggttttataggtygagtttaygagtttttygaggggtgagyggttygggttttttggygttttggtyggttagttaagygttggattatattttttagaggtayggygttyggagygttggattatattttttagaggtatygttttyggagygtagttttattttygttagtttgygagatttggaggtttygygtggggagagggtygygtttgtggaggagtttggtttygtatt

SEQ ID NO: 12610 - DNA, 254 bp, Artificial Sequence
  Description of Artificial Sequence: Synthetic polynucleotide
tttgtatygttttagagttttgggttgtgttygygtagggatygggtygggtagagtygggyggggtggagaggtaagyggagygygyggtggggttgaggggaggygtggggygagtgttygttgttygttttttagtttttttgtttttaygttttttygttygtagtygttygtagttyggyggtgtagttgtgttggattyggyggygtygtagttttttatygttttttgatgttattggggtgygggg

SEQ ID NO: 12611 - DNA, 262 bp, Artificial Sequence
  Description of Artificial Sequence: Synthetic polynucleotide
gaacagcagaaataagagccagggagggaccgcggtcgcggcggcggcggcgagagcgaaagaggaaattgtagaggaggaagttgcgtcgtagttcgagtcgttcggtattttcgtcgtttttgcgttcgcgtcgcgttttcggcgttttttttttagcgcgttttcggtcgttttttcgcgtcgcgttcgtcggttatggttcgggagaacggcgagagtagttttttttggaaaaagtaagttgaagatattaagaaga

SEQ ID NO: 12612 - DNA, 288 bp, Artificial Sequence
  Description of Artificial Sequence: Synthetic polynucleotide
aaattttgcgtaatgtttttttatagatttttttaggtattacgtagtttcgagtttcgagtttcgtttcgggggttttatttcgttttttcgcgttcgcggttcgtttttttttattgagcgtttagttttcgtagttttttcggtcgtcgagcgtcgtgggcggggttttagggcggcggcgtttcgcggggagggtttttcgtgttgggggcgaggttattcgaggtagtttttcgttcgtttttaatttcgtttcgttttcggagtttataaagggaggcgatt

SEQ ID NO: 12613 - DNA, 235 bp, Artificial Sequence
  Description of Artificial Sequence: Synthetic polynucleotide
gtttatcggtttgtttagtttgtagcgttgtttcgtagttattcgtttttttttggcgtttcggttgcgtagttcggttttggttcgtcgtttgttgttggcggtttggttggtcgttttgttgttcgtcgtttcggtcgtcgtttatcgttatttgtggagggatcgcgtatgttagttgtgttattcgtcgtcggtttacgtcgtcgtttatttgagtttggagattttgatt

SEQ ID NO: 12614 - DNA, 273 bp, Artificial Sequence
  Description of Artificial Sequence: Synthetic polynucleotide
ttttagggtttatttaggagggtgtagcggtggttttcggggcggtggtcgtggtgggggtgttagttgtaggggtgttttcggtgggtgggagttggtggtttttcgttggtgttatgggattcgtatgttcgttttgcgtttttcggtttttgagtttataggtcgggattttgtttgttagtcgcgtgcgttgtcgtttaatttttgtaggcgtagagcgcgcggcggcggtgatagagaattttgtttggttgtttaaatatagttttt

SEQ ID NO: 12615 - DNA, 257 bp, Artificial Sequence
  Description of Artificial Sequence: Synthetic polynucleotide
gttgtaggcgggataagtaggttttataggtcgagtttacgagtttttcgaggggtgagcggttcgggttttttggcgttttggtcggttagttaagcgttggattatattttttagaggtacggcgttcggagcgttggattatattttttagaggtatcgttttcggagcgtagttttattttcgttagtttgcgagatttggaggtttcgcgtggggagagggtcgcgtttgtggaggagtttggtttcgtatt

SEQ ID NO: 12616 - DNA, 254 bp, Artificial Sequence
  Description of Artificial Sequence: Synthetic polynucleotide
tttgtatcgttttagagttttgggttgtgttcgcgtagggatcgggtcgggtagagtcgggcggggtggagaggtaagcggagcgcgcggtggggttgaggggaggcgtggggcgagtgttcgttgttcgttttttagtttttttgtttttacgttttttcgttcgtagtcgttcgtagttcggcggtgtagttgtgttggattcggcggcgtcgtagttttttatcgttttttgatgttattggggtgcgggg

SEQ ID NO: 12617 - DNA, 261 bp, Homo sapiens
tcttcttgatgtcttcagcttgctttttccaggaggagctgctctcgccgttctcccgggccatggccgacgagcgcggcgcggaggagcggccgggggcgcgctggggagggggcgccgggggcgcggcgcgggcgcagaggcggcggggatgccgggcggctcgggctgcggcgcagcttcctcctctgcagtttcctctttcgctctcgccgccgccgccgcggccgcggtccctccctggctcttatttctgctgtt

SEQ ID NO: 12618 - DNA, 287 bp, Homo sapiens
ggtcgcctccctttataggctccgagagcggggcggggttgggggcgggcggggagctgcctcgggtggcctcgcccccagcacggaggaccctccccgcgaggcgccgccgccctggagccccgcccacggcgctcgacggccggggaaactgcgggagctgggcgctcagtgggggaaaacgagccgcggacgcgaaggggcgggatgaggcccccggggcggggctcggggctcggggctgcgtgatacctggaggggtctgtgaagggacattgcgcaaggtt

SEQ ID NO: 12619 - DNA, 235 bp, Homo sapiens
ggtcagagtctccaggctcaggtgggcggcggcgtggaccggcgacgggtggcacagctggcatacgcggtccctccacaggtggcggtagacggcggccgggacggcgagcaacagggcggccagccagaccgccagcagcaggcggcgggccagggccgggctgcgcagccgaggcgccaggaaggggcgggtgactgcgaggcagcgctgcaggctgagcaggccggtgagc

SEQ ID NO: 12620 - DNA, 273 bp, Homo sapiens
ggaggctgtatttgggcagccaaacaaagttctctgtcaccgccgccgcgcgctctgcgcctgcaagggttaaacggcagcgcacgcggctggcaggcaggatcccggcctgtgggctcaagagccgaggggcgcagggcgaacatgcgagtcccatggcaccagcgagaggccaccaactcccacccaccgagggcacccctgcagctaacacccccaccacgaccaccgccccgggggccaccgctgcaccctcctgggtgagccctggag

SEQ ID NO: 12621 - DNA, 257 bp, Homo sapiens
ggtgcggagccaagctcctccacagacgcggccctctccccacgcgaggcctccaaatctcgcaaactaacggaaatgaagctacgctccgggagcggtgcctctgggaaatgtagtccagcgctccggacgccgtgcctctgggaaatgtagtccagcgcttggctagccggccagaacgccaggaggcccgggccgctcacccctcgaggggctcgtgggctcggcctgtggaacctgcttgtcccgcctgcagc

SEQ ID NO: 12622 - DNA, 254 bp, Homo sapiens
ccccgcaccccagtgacatcaggaggcgataaaaggctgcggcgccgccggatccagcacagctgcaccgccgagctgcgagcggctgcgagcgagagagcgtaagagcaagagagctagagagcgagcaacgggcactcgccccacgcctcccctcagccccaccgcgcgctccgcttgcctctccaccccgcccgactctacccggcccggtccctgcgcgggcacagcccagagctctggggcggtgcagg

SEQ ID NO: 12623 - DNA, 261 bp, Artificial Sequence
  Description of Artificial Sequence: Synthetic polynucleotide
tcttcttgatgtcttcagcttgctttttccaggaggagctgctctygcygttttttygggttatggtygaygagygyggygyggaggagyggtygggggygygttggggagggggygtygggggygyggygygggygtagaggyggyggggatgtygggyggttygggttgyggygtagtttttttttttgtagttttttttttygttttygtygtygtygtygyggtygyggtttttttttggtttttatttttgttgtt

SEQ ID NO: 12624 - DNA, 287 bp, Artificial Sequence
  Description of Artificial Sequence: Synthetic polynucleotide
ggtygtttttttttataggtttygagagyggggyggggttgggggygggyggggagttgtttygggtggtttygtttttagtayggaggatttttttygygaggygtygtygttttggagtttygtttayggygttygayggtyggggaaattgygggagttgggygtttagtgggggaaaaygagtygyggaygygaaggggygggatgaggttttyggggyggggttyggggttyggggttgygtgatatttggaggggtttgtgaagggatattgygtaaggtt

SEQ ID NO: 12625 - DNA, 235 bp, Artificial Sequence
  Description of Artificial Sequence: Synthetic polynucleotide
ggttagagtttttaggtttaggtgggyggyggygtggatyggygaygggtggtatagttggtataygyggtttttttataggtggyggtagayggyggtygggayggygagtaatagggyggttagttagatygttagtagtaggyggygggttagggtygggttgygtagtygaggygttaggaaggggygggtgattgygaggtagygttgtaggttgagtaggtyggtgagt

SEQ ID NO: 12626 - DNA, 273 bp, Artificial Sequence
  Description of Artificial Sequence: Synthetic polynucleotide
ggaggttgtatttgggtagttaaataaagttttttgttatygtygtygygygttttgygtttgtaagggttaaayggtagygtaygyggttggtaggtaggatttyggtttgtgggtttaagagtygaggggygtagggygaatatgygagttttatggtattagygagaggttattaatttttatttatygagggtatttttgtagttaatatttttattaygattatygtttygggggttatygttgtatttttttgggtgagttttggag

SEQ ID NO: 12627 - DNA, 257 bp, Artificial Sequence
  Description of Artificial Sequence: Synthetic polynucleotide
ggtgyggagttaagtttttttatagaygyggttttttttttaygygaggtttttaaatttygtaaattaayggaaatgaagttaygtttygggagyggtgtttttgggaaatgtagtttagygtttyggaygtygtgtttttgggaaatgtagtttagygtttggttagtyggttagaaygttaggaggttygggtygtttatttttygaggggttygtgggttyggtttgtggaatttgtttgtttygtttgtagt

SEQ ID NO: 12628 - DNA, 254 bp, Artificial Sequence
  Description of Artificial Sequence: Synthetic polynucleotide
cccygtattttagtgatattaggaggygataaaaggttgyggygtygtyggatttagtatagttgtatygtygagttgygagyggttgygagygagagagygtaagagtaagagagttagagagygagtaaygggtattygttttaygtttttttttagttttatygygygtttygtttgtttttttatttygttygattttattyggttyggtttttgygygggtatagtttagagttttggggyggtgtagg

SEQ ID NO: 12629 - DNA, 261 bp, Artificial Sequence
  Description of Artificial Sequence: Synthetic polynucleotide
tcttcttgatgtcttcagcttgctttttccaggaggagctgctctcgccgttttttcgggttatggtcgacgagcgcggcgcggaggagcggtcgggggcgcgttggggagggggcgtcgggggcgcggcgcgggcgtagaggcggcggggatgtcgggcggttcgggttgcggcgtagtttttttttttgtagttttttttttcgttttcgtcgtcgtcgtcgcggtcgcggtttttttttggtttttatttttgttgtt

SEQ ID NO: 12630 - DNA, 287 bp, Artificial Sequence
  Description of Artificial Sequence: Synthetic polynucleotide
ggtcgtttttttttataggtttcgagagcggggcggggttgggggcgggcggggagttgtttcgggtggtttcgtttttagtacggaggatttttttcgcgaggcgtcgtcgttttggagtttcgtttacggcgttcgacggtcggggaaattgcgggagttgggcgtttagtgggggaaaacgagtcgcggacgcgaaggggcgggatgaggttttcggggcggggttcggggttcggggttgcgtgatatttggaggggtttgtgaagggatattgcgtaaggtt

SEQ ID NO: 12631 - DNA, 235 bp, Artificial Sequence
  Description of Artificial Sequence: Synthetic polynucleotide
ggttagagtttttaggtttaggtgggcggcggcgtggatcggcgacgggtggtatagttggtatacgcggtttttttataggtggcggtagacggcggtcgggacggcgagtaatagggcggttagttagatcgttagtagtaggcggcgggttagggtcgggttgcgtagtcgaggcgttaggaaggggcgggtgattgcgaggtagcgttgtaggttgagtaggtcggtgagt

SEQ ID NO: 12632 - DNA, 273 bp, Artificial Sequence
  Description of Artificial Sequence: Synthetic polynucleotide
ggaggttgtatttgggtagttaaataaagttttttgttatcgtcgtcgcgcgttttgcgtttgtaagggttaaacggtagcgtacgcggttggtaggtaggatttcggtttgtgggtttaagagtcgaggggcgtagggcgaatatgcgagttttatggtattagcgagaggttattaatttttatttatcgagggtatttttgtagttaatatttttattacgattatcgtttcgggggttatcgttgtatttttttgggtgagttttggag

SEQ ID NO: 12633 - DNA, 257 bp, Artificial Sequence
  Description of Artificial Sequence: Synthetic polynucleotide
ggtgcggagttaagtttttttatagacgcggttttttttttacgcgaggtttttaaatttcgtaaattaacggaaatgaagttacgtttcgggagcggtgtttttgggaaatgtagtttagcgtttcggacgtcgtgtttttgggaaatgtagtttagcgtttggttagtcggttagaacgttaggaggttcgggtcgtttatttttcgaggggttcgtgggttcggtttgtggaatttgtttgtttcgtttgtagt

SEQ ID NO: 12634 - DNA, 254 bp, Artificial Sequence
  Description of Artificial Sequence: Synthetic polynucleotide
ccccgtattttagtgatattaggaggcgataaaaggttgcggcgtcgtcggatttagtatagttgtatcgtcgagttgcgagcggttgcgagcgagagagcgtaagagtaagagagttagagagcgagtaacgggtattcgttttacgtttttttttagttttatcgcgcgtttcgtttgtttttttatttcgttcgattttattcggttcggtttttgcgcgggtatagtttagagttttggggcggtgtagg

SEQ ID NO: 12635 - DNA, 30 bp, Artificial Sequence
  Description of Artificial Sequence: Synthetic primer
gaatagtagaaataagagttagggagggat

SEQ ID NO: 12636 - DNA, 37 bp, Artificial Sequence
  Description of Artificial Sequence: Synthetic primer
aaattttgygtaatgtttttttatagatttttttagg

SEQ ID NO: 12637 - DNA, 25 bp, Artificial Sequence
  Description of Artificial Sequence: Synthetic primer
gtttatyggtttgtttagtttgtag

SEQ ID NO: 12638 - DNA, 25 bp, Artificial Sequence
  Description of Artificial Sequence: Synthetic primer
ttttagggtttatttaggagggtgt

SEQ ID NO: 12639 - DNA, 29 bp, Artificial Sequence
  Description of Artificial Sequence: Synthetic primer
gttgtaggygggataagtaggttttatag

SEQ ID NO: 12640 - DNA, 30 bp, Artificial Sequence
  Description of Artificial Sequence: Synthetic primer
tttgtatygttttagagttttgggttgtgt

SEQ ID NO: 12641 - DNA, 35 bp, Artificial Sequence
  Description of Artificial Sequence: Synthetic primer
tcttcttaatatcttcaacttactttttccaaaaa

SEQ ID NO: 12642 - DNA, 23 bp, Artificial Sequence
  Description of Artificial Sequence: Synthetic primer
aatcrcctccctttataaactcc

SEQ ID NO: 12643 - DNA, 26 bp, Artificial Sequence
  Description of Artificial Sequence: Synthetic primer
aatcaaaatctccaaactcaaataaa

SEQ ID NO: 12644 - DNA, 33 bp, Artificial Sequence
  Description of Artificial Sequence: Synthetic primer
aaaaactatatttaaacaaccaaacaaaattct

SEQ ID NO: 12645 - DNA, 26 bp, Artificial Sequence
  Description of Artificial Sequence: Synthetic primer
aatacraaaccaaactcctccacaaa

SEQ ID NO: 12646 - DNA, 24 bp, Artificial Sequence
  Description of Artificial Sequence: Synthetic primer
cccrcaccccaataacatcaaaaa

SEQ ID NO: 12647 - DNA, 273 bp, Homo sapiens
ggcgctgctggggctgcctggcaacggcttcgtggtgtggagcttggcgggctggcggcctgcacgggggcgaccgctggcggccacgcttgtgctgcacctggcgctggccgacggcgcggtgctgctgctcacgccgctctttgtggccttcctgacccggcaggcctggccgctgggccaggcgggctgcaaggcggtgtactacgtgtgcgcgctcagcatgtacgccagcgtgctgctcaccggcctgctcagcctgcagcgctgcct

SEQ ID NO: 12648 - DNA, 259 bp, Homo sapiens
ggtcgtgtgcccaggactgtcccccagcggccactcgggccccagccccccaggcctggccttgacaggcgggcggagcagccagtgcgagacagggaggccggtgcgggtgcgggaacctgatccgcccgggaggcgggggcggggcgggggcgcagcgcgcggggaggggccggcgcccgccttcctcccccattcattcagctgagccagggggcctaggggctcctccggcggctagctctgcactgcaggagcg

SEQ ID NO: 12649 - DNA, 220 bp, Homo sapiens
gggaaaagcagcagcccaaaggctctgaattcctcttccccgccacacgcacggaatcctgagcccccggagcctcggggccgaggccggcccgggacggtgctccgagtagctctccactgctggggagccggccctgtttttgtttgaacgttttgtaacgattaagcagatcccggcgtcagcccgccgcggagaggctcaaacaggcataaagtgc

SEQ ID NO: 12650 - DNA, 273 bp, Artificial Sequence
  Description of Artificial Sequence: Synthetic polynucleotide
ggygttgttggggttgtttggtaayggtttygtggtgtggagtttggygggttggyggtttgtaygggggygatygttggyggttaygtttgtgttgtatttggygttggtygayggygyggtgttgttgtttaygtygttttttgtggtttttttgattyggtaggtttggtygttgggttaggygggttgtaaggyggtgtattaygtgtgygygtttagtatgtaygttagygtgttgtttatyggtttgtttagtttgtagygttgttt

SEQ ID NO: 12651 - DNA, 259 bp, Artificial Sequence
  Description of Artificial Sequence: Synthetic polynucleotide
ggtygtgtgtttaggattgttttttagyggttattygggttttagttttttaggtttggttttgataggygggyggagtagttagtgygagatagggaggtyggtgygggtgygggaatttgattygttygggaggygggggyggggygggggygtagygygyggggaggggtyggygttygttttttttttttatttatttagttgagttagggggtttaggggttttttyggyggttagttttgtattgtaggagyg

SEQ ID NO: 12652 - DNA, 220 bp, Artificial Sequence
  Description of Artificial Sequence: Synthetic polynucleotide
gggaaaagtagtagtttaaaggttttgaatttttttttttygttataygtayggaattttgagttttyggagtttyggggtygaggtyggttygggayggtgtttygagtagttttttattgttggggagtyggttttgtttttgtttgaaygttttgtaaygattaagtagatttyggygttagttygtygyggagaggtttaaataggtataaagtgy

SEQ ID NO: 12653 - DNA, 273 bp, Artificial Sequence
  Description of Artificial Sequence: Synthetic polynucleotide
ggcgttgttggggttgtttggtaacggtttcgtggtgtggagtttggcgggttggcggtttgtacgggggcgatcgttggcggttacgtttgtgttgtatttggcgttggtcgacggcgcggtgttgttgtttacgtcgttttttgtggtttttttgattcggtaggtttggtcgttgggttaggcgggttgtaaggcggtgtattacgtgtgcgcgtttagtatgtacgttagcgtgttgtttatcggtttgtttagtttgtagcgttgttt

SEQ ID NO: 12654 - DNA, 259 bp, Artificial Sequence
  Description of Artificial Sequence: Synthetic polynucleotide
ggtcgtgtgtttaggattgttttttagcggttattcgggttttagttttttaggtttggttttgataggcgggcggagtagttagtgcgagatagggaggtcggtgcgggtgcgggaatttgattcgttcgggaggcgggggcggggcgggggcgtagcgcgcggggaggggtcggcgttcgttttttttttttatttatttagttgagttagggggtttaggggttttttcggcggttagttttgtattgtaggagcg

SEQ ID NO: 12655 - DNA, 220 bp, Artificial Sequence
  Description of Artificial Sequence: Synthetic polynucleotide
gggaaaagtagtagtttaaaggttttgaatttttttttttcgttatacgtacggaattttgagttttcggagtttcggggtcgaggtcggttcgggacggtgtttcgagtagttttttattgttggggagtcggttttgtttttgtttgaacgttttgtaacgattaagtagatttcggcgttagttcgtcgcggagaggtttaaataggtataaagtgy

SEQ ID NO: 12656 - DNA, 272 bp, Homo sapiens
aggcagcgctgcaggctgagcaggccggtgagcagcacgctggcgtacatgctgagcgcgcacacgtagtacaccgccttgcagcccgcctggcccagcggccaggcctgccgggtcaggaaggccacaaagagcggcgtgagcagcagcaccgcgccgtcggccagcgccaggtgcagcacaagcgtggccgccagcggtcgcccccgtgcaggccgccagcccgccaagctccacaccacgaagccgttgccaggcagccccagcagcgc

SEQ ID NO: 12657 - DNA, 259 bp, Homo sapiens
cgctcctgcagtgcagagctagccgccggaggagcccctaggccccctggctcagctgaatgaatgggggaggaaggcgggcgccggcccctccccgcgcgctgcgcccccgccccgcccccgcctcccgggcggatcaggttcccgcacccgcaccggcctccctgtctcgcactggctgctccgcccgcctgtcaaggccaggcctggggggctggggcccgagtggccgctgggggacagtcctgggcacacgacc

SEQ ID NO: 12658 - DNA, 220 bp, Homo sapiens
gcactttatgcctgtttgagcctctccgcggcgggctgacgccgggatctgcttaatcgttacaaaacgttcaaacaaaaacagggccggctccccagcagtggagagctactcggagcaccgtcccgggccggcctcggccccgaggctccgggggctcaggattccgtgcgtgtggcggggaagaggaattcagagcctttgggctgctgcttttccc

SEQ ID NO: 12659 - DNA, 272 bp, Artificial Sequence
  Description of Artificial Sequence: Synthetic polynucleotide
aggtagygttgtaggttgagtaggtyggtgagtagtaygttggygtatatgttgagygygtataygtagtatatygttttgtagttygtttggtttagyggttaggtttgtygggttaggaaggttataaagagyggygtgagtagtagtatygygtygtyggttagygttaggtgtagtataagygtggtygttagyggtygttttygtgtaggtygttagttygttaagttttatattaygaagtygttgttaggtagttttagtagygt

SEQ ID NO: 12660 - DNA, 259 bp, Artificial Sequence
  Description of Artificial Sequence: Synthetic polynucleotide
ygtttttgtagtgtagagttagtygtyggaggagtttttaggttttttggtttagttgaatgaatgggggaggaaggygggygtyggttttttttygygygttgygttttygtttygttttygtttttygggyggattaggttttygtattygtatyggtttttttgtttygtattggttgtttygttygtttgttaaggttaggtttggggggttggggttygagtggtygttgggggatagttttgggtataygatt

SEQ ID NO: 12661 - DNA, 220 bp, Artificial Sequence
  Description of Artificial Sequence: Synthetic polynucleotide
gtattttatgtttgtttgagttttttygyggygggttgaygtygggatttgtttaatygttataaaaygtttaaataaaaatagggtyggttttttagtagtggagagttattyggagtatygtttygggtyggtttyggtttygaggtttygggggtttaggatttygtgygtgtggyggggaagaggaatttagagtttttgggttgttgtttttttt

SEQ ID NO: 12662 - DNA, 272 bp, Artificial Sequence
  Description of Artificial Sequence: Synthetic polynucleotide
aggtagcgttgtaggttgagtaggtcggtgagtagtacgttggcgtatatgttgagcgcgtatacgtagtatatcgttttgtagttcgtttggtttagcggttaggtttgtcgggttaggaaggttataaagagcggcgtgagtagtagtatcgcgtcgtcggttagcgttaggtgtagtataagcgtggtcgttagcggtcgttttcgtgtaggtcgttagttcgttaagttttatattacgaagtcgttgttaggtagttttagtagcgt

SEQ ID NO: 12663 - DNA, 259 bp, Artificial Sequence
  Description of Artificial Sequence: Synthetic polynucleotide
cgtttttgtagtgtagagttagtcgtcggaggagtttttaggttttttggtttagttgaatgaatgggggaggaaggcgggcgtcggttttttttcgcgcgttgcgttttcgtttcgttttcgtttttcgggcggattaggttttcgtattcgtatcggtttttttgtttcgtattggttgtttcgttcgtttgttaaggttaggtttggggggttggggttcgagtggtcgttgggggatagttttgggtatacgatt

SEQ ID NO: 12664 - DNA, 220 bp, Artificial Sequence
  Description of Artificial Sequence: Synthetic polynucleotide
gtattttatgtttgtttgagttttttcgcggcgggttgacgtcgggatttgtttaatcgttataaaacgtttaaataaaaatagggtcggttttttagtagtggagagttattcggagtatcgtttcgggtcggtttcggtttcgaggtttcgggggtttaggatttcgtgcgtgtggcggggaagaggaatttagagtttttgggttgttgtttttttt

SEQ ID NO: 12665 - DNA, 24 bp, Artificial Sequence
  Description of Artificial Sequence: Synthetic primer
ggygttgttggggttgtttggtaa

SEQ ID NO: 12666 - DNA, 24 bp, Artificial Sequence
  Description of Artificial Sequence: Synthetic primer
ggtygtgtgtttaggattgttttt

SEQ ID NO: 12667 - DNA, 26 bp, Artificial Sequence
  Description of Artificial Sequence: Synthetic primer
gggaaaagtagtagtttaaaggtttt

SEQ ID NO: 12668 - DNA, 25 bp, Artificial Sequence
  Description of Artificial Sequence: Synthetic primer
aaacaacrctacaaactaaacaaac

SEQ ID NO: 12669 - DNA, 24 bp, Artificial Sequence
  Description of Artificial Sequence: Synthetic primer
crctcctacaatacaaaactaacc

SEQ ID NO: 12670 - DNA, 26 bp, Artificial Sequence
  Description of Artificial Sequence: Synthetic primer
acactttatacctatttaaacctctc

SEQ ID NO: 12671 - DNA, 2 bp, Homo sapiens
cg

SEQ ID NO: 12672 - DNA, 9 bp, Homo sapiens
cgaatggcg

SEQ ID NO: 12673 - DNA, 2 bp, Homo sapiens
cg

SEQ ID NO: 12674 - DNA, 2 bp, Homo sapiens
cg

SEQ ID NO: 12675 - DNA, 2 bp, Homo sapiens
cg

SEQ ID NO: 12676 - DNA, 2 bp, Homo sapiens
cg

SEQ ID NO: 12677 - DNA, 2 bp, Homo sapiens
cg

SEQ ID NO: 12678 - DNA, 2 bp, Homo sapiens
cg

SEQ ID NO: 12679 - DNA, 2 bp, Homo sapiens
cg

SEQ ID NO: 12680 - DNA, 2 bp, Homo sapiens
cg

SEQ ID NO: 12681 - DNA, 2 bp, Homo sapiens
cg

SEQ ID NO: 12682 - DNA, 2 bp, Homo sapiens
cg

SEQ ID NO: 12683 - DNA, 36 bp, Homo sapiens
cggctcacgcagggtgcgcgcacccactgacctgcg

SEQ ID NO: 12684 - DNA, 2 bp, Homo sapiens
cg

SEQ ID NO: 12685 - DNA, 2 bp, Homo sapiens
cg

SEQ ID NO: 12686 - DNA, 2 bp, Homo sapiens
cg

SEQ ID NO: 12687 - DNA, 2 bp, Homo sapiens
cg

SEQ ID NO: 12688 - DNA, 2 bp, Homo sapiens
cg

SEQ ID NO: 12689 - DNA, 2 bp, Homo sapiens
cg

SEQ ID NO: 12690 - DNA, 2 bp, Homo sapiens
cg

SEQ ID NO: 12691 - DNA, 2 bp, Homo sapiens
cg

SEQ ID NO: 12692 - DNA, 2 bp, Homo sapiens
cg

SEQ ID NO: 12693 - DNA, 2 bp, Homo sapiens
cg

SEQ ID NO: 12694 - DNA, 8 bp, Homo sapiens
cgacggcg

SEQ ID NO: 12695 - DNA, 2 bp, Homo sapiens
cg

SEQ ID NO: 12696 - DNA, 2 bp, Homo sapiens
cg

SEQ ID NO: 12697 - DNA, 2 bp, Homo sapiens
cg

SEQ ID NO: 12698 - DNA, 2 bp, Homo sapiens
cg

SEQ ID NO: 12699 - DNA, 2 bp, Homo sapiens
cg

SEQ ID NO: 12700 - DNA, 2 bp, Homo sapiens
cg

SEQ ID NO: 12701 - DNA, 2 bp, Homo sapiens
cg

SEQ ID NO: 12702 - DNA, 2 bp, Homo sapiens
cg

SEQ ID NO: 12703 - DNA, 2 bp, Homo sapiens
cg

SEQ ID NO: 12704 - DNA, 2 bp, Homo sapiens
cg

SEQ ID NO: 12705 - DNA, 181 bp, Homo sapiens
cggagattgcagtgagccgagatcgtgccattgcactccaatggcactccagcctgatgacagagcgagactccgtctcaaaaataataataaataaataaacaaacaaacaaaaattagctgggcgtggtggcgtgtgcctgtagtcccagctactcgggagactgaggcaggagaatcg

SEQ ID NO: 12706 - DNA, 2 bp, Homo sapiens
cg

SEQ ID NO: 12707 - DNA, 2 bp, Homo sapiens
cg

SEQ ID NO: 12708 - DNA, 2 bp, Homo sapiens
cg

SEQ ID NO: 12709 - DNA, 2 bp, Homo sapiens
cg

SEQ ID NO: 12710 - DNA, 2 bp, Homo sapiens
cg

SEQ ID NO: 12711 - DNA, 2 bp, Homo sapiens
cg

SEQ ID NO: 12712 - DNA, 2 bp, Homo sapiens
cg

SEQ ID NO: 12713 - DNA, 2 bp, Homo sapiens
cg

SEQ ID NO: 12714 - DNA, 2 bp, Homo sapiens
cg

SEQ ID NO: 12715 - DNA, 2 bp, Homo sapiens
cg

SEQ ID NO: 12716 - DNA, 369 bp, Homo sapiens
cgcgtttgaggagcccttcagcccgtcgctgcactgtgggagcccctttctgggctggacaaggctggagccggctccctcagcttgcgggtaggtgtggagagagaggcgtgggcgggaaccgtggctgcaggctgcgcttgcgggccagctcgagttccgggtgggcgtgggcttggcaagccccgcactcggagcggccagccggcccgggcagtgaggagcttagcacctgggccagcagctgctgtgctcgacttctcgctgggccttagctgcctccccgccgggcagggctcgggacctgcagccctccatgcctgagcctccacccccgccgtgcgctcctgtgcagcccaagcctccccg

SEQ ID NO: 12717 - DNA, 2 bp, Homo sapiens
cg

SEQ ID NO: 12718 - DNA, 2 bp, Homo sapiens
cg

SEQ ID NO: 12719 - DNA, 2 bp, Homo sapiens
cg

SEQ ID NO: 12720 - DNA, 2 bp, Homo sapiens
cg

SEQ ID NO: 12721 - DNA, 2 bp, Homo sapiens
cg

SEQ ID NO: 12722 - DNA, 2 bp, Homo sapiens
cg

SEQ ID NO: 12723 - DNA, 2 bp, Homo sapiens
cg

SEQ ID NO: 12724 - DNA, 2 bp, Homo sapiens
cg

SEQ ID NO: 12725 - DNA, 2 bp, Homo sapiens
cg

SEQ ID NO: 12726 - DNA, 2 bp, Homo sapiens
cg

SEQ ID NO: 12727 - DNA, 2 bp, Homo sapiens
cg

SEQ ID NO: 12728 - DNA, 2 bp, Homo sapiens
cg

SEQ ID NO: 12729 - DNA, 2 bp, Homo sapiens
cg

SEQ ID NO: 12730 - DNA, 2 bp, Homo sapiens
cg

SEQ ID NO: 12731 - DNA, 2 bp, Homo sapiens
cg

SEQ ID NO: 12732 - DNA, 2 bp, Homo sapiens
cg

SEQ ID NO: 12733 - DNA, 2 bp, Homo sapiens
cg

SEQ ID NO: 12734 - DNA, 2 bp, Homo sapiens
cg

SEQ ID NO: 12735 - DNA, 2 bp, Homo sapiens
cg

SEQ ID NO: 12736 - DNA, 2 bp, Homo sapiens
cg

SEQ ID NO: 12737 - DNA, 2 bp, Homo sapiens
cg

SEQ ID NO: 12738 - DNA, 35 bp, Homo sapiens
cgcttgcaccactacctcgacttcatttactaccg

SEQ ID NO: 12739 - DNA, 2 bp, Homo sapiens
cg

SEQ ID NO: 12740 - DNA, 2 bp, Homo sapiens
cg

SEQ ID NO: 12741 - DNA, 2 bp, Homo sapiens
cg

SEQ ID NO: 12742 - DNA, 2 bp, Homo sapiens
cg

SEQ ID NO: 12743 - DNA, 2 bp, Homo sapiens
cg

SEQ ID NO: 12744 - DNA, 2 bp, Homo sapiens
cg

SEQ ID NO: 12745 - DNA, 2 bp, Homo sapiens
cg

SEQ ID NO: 12746 - DNA, 2 bp, Homo sapiens
cg

SEQ ID NO: 12747 - DNA, 2 bp, Homo sapiens
cg

SEQ ID NO: 12748 - DNA, 2 bp, Homo sapiens
cg

SEQ ID NO: 12749 - DNA, 487 bp, Homo sapiens
cgcccagggcgggaatccagcgcacgggtgaggactttaaaaagcaaggggcaggatgagtcaacaaggttttgagcaggaaaactatgcgataggaagtgtatacattgccctatagcagaaagaccggggacgggaccagcctccaagcgacttcaaacccaaaaggaagcaacttccagactcttatgggcgtctcaatttgctctgggtgaaggaagacaggcaagaatttccaggtctgtgaggaccccacgtcccagggacagaagtgccagggacctgggaagtgcagacttaatacaaggcagagcaaaactcacgcgcctcggtaggacctttactccacgtgatccacttccgggtttgctgcgcaggacagaagccagtcccgggtggggcccccgaacatggtggcggggcctgggtgggacagaggcggggcgcgaggcggagagaccttgccctttagaacaggcaaagggcg

SEQ ID NO: 12750 - DNA, 2 bp, Homo sapiens
cg

SEQ ID NO: 12751 - DNA, 2 bp, Homo sapiens
cg

SEQ ID NO: 12752 - DNA, 2 bp, Homo sapiens
cg

SEQ ID NO: 12753 - DNA, 2 bp, Homo sapiens
cg

SEQ ID NO: 12754 - DNA, 2 bp, Homo sapiens
cg

SEQ ID NO: 12755 - DNA, 2 bp, Homo sapiens
cg

SEQ ID NO: 12756 - DNA, 2 bp, Homo sapiens
cg

SEQ ID NO: 12757 - DNA, 2 bp, Homo sapiens
cg

SEQ ID NO: 12758 - DNA, 2 bp, Homo sapiens
cg

SEQ ID NO: 12759 - DNA, 2 bp, Homo sapiens
cg

SEQ ID NO: 12760 - DNA, 28 bp, Homo sapiens
cgtcttgatctcctgacctcgtgatccg

SEQ ID NO: 12761 - DNA, 2 bp, Homo sapiens
cg

SEQ ID NO: 12762 - DNA, 2 bp, Homo sapiens
cg

SEQ ID NO: 12763 - DNA, 2 bp, Homo sapiens
cg

SEQ ID NO: 12764 - DNA, 2 bp, Homo sapiens
cg

SEQ ID NO: 12765 - DNA, 2 bp, Homo sapiens
cg

SEQ ID NO: 12766 - DNA, 2 bp, Homo sapiens
cg

SEQ ID NO: 12767 - DNA, 2 bp, Homo sapiens
cg

SEQ ID NO: 12768 - DNA, 2 bp, Homo sapiens
cg

SEQ ID NO: 12769 - DNA, 2 bp, Homo sapiens
cg

SEQ ID NO: 12770 - DNA, 2 bp, Homo sapiens
cg

SEQ ID NO: 12771 - DNA, 2 bp, Homo sapiens
cg

SEQ ID NO: 12772 - DNA, 2 bp, Homo sapiens
cg

SEQ ID NO: 12773 - DNA, 2 bp, Homo sapiens
cg

SEQ ID NO: 12774 - DNA, 2 bp, Homo sapiens
cg

SEQ ID NO: 12775 - DNA, 2 bp, Homo sapiens
cg

SEQ ID NO: 12776 - DNA, 2 bp, Homo sapiens
cg

SEQ ID NO: 12777 - DNA, 2 bp, Homo sapiens
cg

SEQ ID NO: 12778 - DNA, 2 bp, Homo sapiens
cg

SEQ ID NO: 12779 - DNA, 2 bp, Homo sapiens
cg

SEQ ID NO: 12780 - DNA, 2 bp, Homo sapiens
cg

SEQ ID NO: 12781 - DNA, 2 bp, Homo sapiens
cg

SEQ ID NO: 12782 - DNA, 18 bp, Homo sapiens
cgcgccttcctgaccgcg

SEQ ID NO: 12783 - DNA, 18 bp, Homo sapiens
cgcaggtcagtgagtgcg

SEQ ID NO: 12784 - DNA, 2 bp, Homo sapiens
cg

SEQ ID NO: 12785 - DNA, 2 bp, Homo sapiens
cg

SEQ ID NO: 12786 - DNA, 2 bp, Homo sapiens
cg

SEQ ID NO: 12787 - DNA, 2 bp, Homo sapiens
cg

SEQ ID NO: 12788 - DNA, 2 bp, Homo sapiens
cg

SEQ ID NO: 12789 - DNA, 2 bp, Homo sapiens
cg

SEQ ID NO: 12790 - DNA, 2 bp, Homo sapiens
cg

SEQ ID NO: 12791 - DNA, 2 bp, Homo sapiens
cg

SEQ ID NO: 12792 - DNA, 2 bp, Homo sapiens
cg

SEQ ID NO: 12793 - DNA, 2 bp, Homo sapiens
cg

SEQ ID NO: 12794 - DNA, 87 bp, Homo sapiens
cgagccgaagcagggcgaggcattgcctcacctgggaagcgcaaggggtcagagagttccctttccgagtcaaataaatgggtgacg

SEQ ID NO: 12795 - DNA, 2 bp, Homo sapiens
cg

SEQ ID NO: 12796 - DNA, 2 bp, Homo sapiens
cg

SEQ ID NO: 12797 - DNA, 2 bp, Homo sapiens
cg

SEQ ID NO: 12798 - DNA, 2 bp, Homo sapiens
cg

SEQ ID NO: 12799 - DNA, 2 bp, Homo sapiens
cg

SEQ ID NO: 12800 - DNA, 2 bp, Homo sapiens
cg

SEQ ID NO: 12801 - DNA, 2 bp, Homo sapiens
cg

SEQ ID NO: 12802 - DNA, 2 bp, Homo sapiens
cg

SEQ ID NO: 12803 - DNA, 2 bp, Homo sapiens
cg

SEQ ID NO: 12804 - DNA, 2 bp, Homo sapiens
cg

SEQ ID NO: 12805 - DNA, 11 bp, Homo sapiens
cggagcttgcg

SEQ ID NO: 12806 - DNA, 2 bp, Homo sapiens
cg

SEQ ID NO: 12807 - DNA, 2 bp, Homo sapiens
cg

SEQ ID NO: 12808 - DNA, 2 bp, Homo sapiens
cg

SEQ ID NO: 12809 - DNA, 2 bp, Homo sapiens
cg

SEQ ID NO: 12810 - DNA, 2 bp, Homo sapiens
cg

SEQ ID NO: 12811 - DNA, 2 bp, Homo sapiens
cg

SEQ ID NO: 12812 - DNA, 2 bp, Homo sapiens
cg

SEQ ID NO: 12813 - DNA, 2 bp, Homo sapiens
cg

SEQ ID NO: 12814 - DNA, 2 bp, Homo sapiens
cg

SEQ ID NO: 12815 - DNA, 2 bp, Homo sapiens
cg

SEQ ID NO: 12816 - DNA, 2 bp, Homo sapiens
cg

SEQ ID NO: 12817 - DNA, 2 bp, Homo sapiens
cg

SEQ ID NO: 12818 - DNA, 2 bp, Homo sapiens
cg

SEQ ID NO: 12819 - DNA, 2 bp, Homo sapiens
cg

SEQ ID NO: 12820 - DNA, 2 bp, Homo sapiens
cg

SEQ ID NO: 12821 - DNA, 2 bp, Homo sapiens
cg

SEQ ID NO: 12822 - DNA, 2 bp, Homo sapiens
cg

SEQ ID NO: 12823 - DNA, 2 bp, Homo sapiens
cg

SEQ ID NO: 12824 - DNA, 2 bp, Homo sapiens
cg

SEQ ID NO: 12825 - DNA, 167 bp, Homo sapiens
cgcaccgtgggcgagccgaagcagggcgaggcattgcctcacctgggaagcgccaggggtcagggagttccctttccgagtcaaggaaaggggtgaccgacgcacctagaaaatcgggtcactcccacccgaatattgcgcttttcagaccggcttaaaaaatggcg

SEQ ID NO: 12826 - DNA, 2 bp, Homo sapiens
cg

SEQ ID NO: 12827 - DNA, 2 bp, Homo sapiens
cg

SEQ ID NO: 12828 - DNA, 2 bp, Homo sapiens
cg

SEQ ID NO: 12829 - DNA, 185 bp, Homo sapiens
cgctgaatgtccaggactgcgaggtctccgtggaggccctgcgctttgtcaaacgccactgcaagcgctgcgtcatcgagcacaccaacccggctttcttctgaagggacagagttcatccggcgttgtattcacacaaacctgaacaaagcaaatttttttaaaagcagcgtatgtaagcaccg

SEQ ID NO: 12830 - DNA, 17 bp, Homo sapiens
cgagccgaagcagggcg

SEQ ID NO: 12831 - DNA, 135 bp, Homo sapiens
cgtgcgcgagccgaagcagggtaaggcaatgcctcactcgggaagcgccaggggtcagggagttccctttcctagtcaaagaaaggggtgacggacgcacctggaaaatcgggtcactcccacccgaatattgcg

SEQ ID NO: 12832 - DNA, 2 bp, Homo sapiens
cg

SEQ ID NO: 12833 - DNA, 71 bp, Homo sapiens
cgctcgctcttggcgcctcctcggccttggcacccactctggccgcgcttgaggagcccttcagcccgccg

SEQ ID NO: 12834 - DNA, 54 bp, Homo sapiens
cgcgcaccgtgcgcgagccgaagcagggcgaggcattgcctcacttgggaagcg

SEQ ID NO: 12835 - DNA, 5 bp, Homo sapiens
cggcg

SEQ ID NO: 12836 - DNA, 29 bp, Homo sapiens
cgccggtttttaagcccgtaggaaaagcg

SEQ ID NO: 12837 - DNA, 18 bp, Homo sapiens
cgctttctagtgtctgcg

SEQ ID NO: 12838 - DNA, 2 bp, Homo sapiens
cg

SEQ ID NO: 12839 - DNA, 5 bp, Homo sapiens
cgacg

SEQ ID NO: 12840 - DNA, 24 bp, Homo sapiens
cgaagcgcctcctgcgcagactcg

SEQ ID NO: 12841 - DNA, 2 bp, Homo sapiens
cg

SEQ ID NO: 12842 - DNA, 4 bp, Homo sapiens
cgcg

SEQ ID NO: 12843 - DNA, 2 bp, Homo sapiens
cg

SEQ ID NO: 12844 - DNA, 2 bp, Homo sapiens
cg

SEQ ID NO: 12845 - DNA, 2 bp, Homo sapiens
cg

SEQ ID NO: 12846 - DNA, 2 bp, Homo sapiens
cg

SEQ ID NO: 12847 - DNA, 2 bp, Homo sapiens
cg

SEQ ID NO: 12848 - DNA, 2 bp, Homo sapiens
cg

SEQ ID NO: 12849 - DNA, 2 bp, Homo sapiens
cg

SEQ ID NO: 12850 - DNA, 2 bp, Homo sapiens
cg

SEQ ID NO: 12851 - DNA, 2 bp, Homo sapiens
cg

SEQ ID NO: 12852 - DNA, 2 bp, Homo sapiens
cg

SEQ ID NO: 12853 - DNA, 12 bp, Homo sapiens
cggggcaggtcg

SEQ ID NO: 12854 - DNA, 2 bp, Homo sapiens
cg

SEQ ID NO: 12855 - DNA, 2 bp, Homo sapiens
cg

SEQ ID NO: 12856 - DNA, 2 bp, Homo sapiens
cg

SEQ ID NO: 12857 - DNA, 2 bp, Homo sapiens
cg

SEQ ID NO: 12858 - DNA, 2 bp, Homo sapiens
cg

SEQ ID NO: 12859 - DNA, 2 bp, Homo sapiens
cg

SEQ ID NO: 12860 - DNA, 2 bp, Homo sapiens
cg

SEQ ID NO: 12861 - DNA, 2 bp, Homo sapiens
cg

SEQ ID NO: 12862 - DNA, 2 bp, Homo sapiens
cg

SEQ ID NO: 12863 - DNA, 2 bp, Homo sapiens
cg

SEQ ID NO: 12864 - DNA, 2 bp, Homo sapiens
cg

SEQ ID NO: 12865 - DNA, 2 bp, Homo sapiens
cg

SEQ ID NO: 12866 - DNA, 2 bp, Homo sapiens
cg

SEQ ID NO: 12867 - DNA, 2 bp, Homo sapiens
cg

SEQ ID NO: 12868 - DNA, 2 bp, Homo sapiens
cg

SEQ ID NO: 12869 - DNA, 2 bp, Homo sapiens
cg

SEQ ID NO: 12870 - DNA, 2 bp, Homo sapiens
cg

SEQ ID NO: 12871 - DNA, 2 bp, Homo sapiens
cg

SEQ ID NO: 12872 - DNA, 2 bp, Homo sapiens
cg

SEQ ID NO: 12873 - DNA, 2 bp, Homo sapiens
cg

SEQ ID NO: 12874 - DNA, 2 bp, Homo sapiens
cg

SEQ ID NO: 12875 - DNA, 80 bp, Homo sapiens
cgtactcgcgccaggagtatggactcacccagggagtgcttgggcggagaagcagcctctgctccaggccttccgctgcg

SEQ ID NO: 12876 - DNA, 2 bp, Homo sapiens
cg

SEQ ID NO: 12877 - DNA, 2 bp, Homo sapiens
cg

SEQ ID NO: 12878 - DNA, 2 bp, Homo sapiens
cg

SEQ ID NO: 12879 - DNA, 2 bp, Homo sapiens
cg

SEQ ID NO: 12880 - DNA, 2 bp, Homo sapiens
cg

SEQ ID NO: 12881 - DNA, 2 bp, Homo sapiens
cg

SEQ ID NO: 12882 - DNA, 2 bp, Homo sapiens
cg

SEQ ID NO: 12883 - DNA, 2 bp, Homo sapiens
cg

SEQ ID NO: 12884 - DNA, 2 bp, Homo sapiens
cg

SEQ ID NO: 12885 - DNA, 2 bp, Homo sapiens
cg

SEQ ID NO: 12886 - DNA, 4 bp, Homo sapiens
cgcg

SEQ ID NO: 12887 - DNA, 2 bp, Homo sapiens
cg

SEQ ID NO: 12888 - DNA, 2 bp, Homo sapiens
cg

SEQ ID NO: 12889 - DNA, 2 bp, Homo sapiens
cg

SEQ ID NO: 12890 - DNA, 2 bp, Homo sapiens
cg

SEQ ID NO: 12891 - DNA, 2 bp, Homo sapiens
cg

SEQ ID NO: 12892 - DNA, 2 bp, Homo sapiens
cg

SEQ ID NO: 12893 - DNA, 2 bp, Homo sapiens
cg

SEQ ID NO: 12894 - DNA, 2 bp, Homo sapiens
cg

SEQ ID NO: 12895 - DNA, 2 bp, Homo sapiens
cg

SEQ ID NO: 12896 - DNA, 2 bp, Homo sapiens
cg

SEQ ID NO: 12897 - DNA, 3039 bp, Homo sapiens
cgccagactcggggttgtcgtggagttcctgacttgaacccagggtgcgtgtcgcgcccacggggggacaccccaaagcggcaagaatgccccctgggaagggaacaggacgccaggcttgaaaggggactttgaagcagtccaggaaaaaacttcccacggaccacggtgccttcccggcagcccctttgccaggcccgagggggttgttgtgtcccaggcttgcacccagggttccacggggggcaccccaaagcggcaagtaggttcccaggggaaggggacagcacgtcaggcttggagggggacgttgaggcagccccgggaataaagaggggatgctggggtcctgccacggataacactgtcttcccgacagcatctgtggtgggcctgggagcgtcatggagtccttggcttgcacccaaggtgcgtgtctcgccctcggggggcaccacaaagcggcaagaaggccaccgggggaagggtatgggacgccagggttgaaagggatagttgaggcagtccggggaaaaacgtggcaggctggggtcgtcccatggacgacagtgccttcccagcagcccctgcgtcaggcccggggtggtcgtggagtccctggcttgcaccgagggtgcgggtcgcacccatgggggcaccccaaagtggcaagaaggccgccgggcgaacgccacagaaggccaggctttaatggggatgctgaggcagcacagagagaaaagcggctagtcgggttcctcctacggatgacagtgccttcctggcagtccctgcgctgggcccggggggatcgtggagtccctatcttgcacccagggtgcgtgtttcgcccatgggaggcaccccaaagcggcaagtaggcccctgggggaaggggacagcacctcagacttgaagggggactttgaggtagcccgtggaaaaaaacggcgacgctgagtttctcccacaaacgacagtgccttcctggcagccccttcgctgggccagggtggtcctggagtccgtggcttgcacccagggtgcgtgtctcgctcaagggggcaccccaaagcggcaagtagattcccgggggaagggagagcacgtcaggcttgaaggggaggttgaggcggccccggggtaaaagtggtgaagctggggtcctcccacggatgacaccgccttcctggcagcctctgcagtgggcccagaggtgtcgtggagtctctggcttgctcccaggttgtgtgtctcgcccacgagtggcaccacaaagcagcaagaaggcccccaggggaagggtacaggactccagggttgaaaggtagagttgaggcagaccggtgtcatcccaaggacaacagtgtcttgtccggtagcccctgcatcgggcctggggtggttgtggagtccctggcttgcacccggggtgcgtgtcgtgcccacgatgggcaccgcaatgcggtaagaagtccccgagtggaagggaacaggacgccgagcttgaaaggggacgttgaggcagtccggggaaaaaatttccactgagaacagtgccttcccggcagcctctgagtgggacccaggtggacggtggagcccctggcttggacccagggtgcctgtcttgctcacggggtgcacgtgaaagtggcaacagggcccccgggggaaggggacaacatgtcaggcttgaagagggacgttgggccagccagaggaaaacagcggctaggctgtggtcgtcccacagaccacagtgccttcccggcagcccctgagcctggcccaggcgggggggtttggagtccctgtcttgcaacagagtgcgtgtctcgcctaagtgtgcacgcgaaagctgcaagaagggctccgggggaagggaacaggatgccaggcttgaaaggggactttgaggcagtccagggaaaaactttccacggaggacagtgacttcccgacatcccctgcgcctggccctgggggtcttggagtccctggtttacacccagggtgcgtgcctcgcccacgggtggcaccccaaagcagcaagaaagccccggggggggaagaacaggatgccagacttgaaaggggacgttgaggcagcccaggaaaaaaaggggcgaggctggggtcctttcacggatgacagtgccttccctacagcccctatgccagtcccgggagggtcgcggagtccctgtcttgcacacaatgtgcgtgtctcgcccacggggggcaccccaaagtggcaagaagtcccccgcgggaaggcaacaggacgccaggcttgaatggggacgtttaggtagcctggagaaaaaagcagcgaggctggggtgatcccacgaatgacagtgccttaccggcagcccctttgccgggcatgcgggggttgttgattccctggcttgcacccagggtgagtgtcttgcccacggcgggcaccacaaagcagcaagaaggttcccgggggaaagggacagcacgtcagtcttgaagggggaagttgaggcagccccggggaaaaaaagcggggatgctggggtcctctcacggacgacactgccttcccagcagcctctgcagtgggcccgggagcgtcctggagtccctgtcttgcaccccgggtgcgtgtctcacccacggggagcaccacaaagcggcaagaaggccactgggggaagggtacaggacgccagggttgaaggggatagtggagacagtccaaggaaaaaagtggcgggatggtgtcgtcccaaggatggccacccctgcgccgggccagggatggtcgcggagtccctggcttgcacccaggttgtgtgtctcgcccacagggggcaccccaaagcagcacgaaggcctccaggggaagggaagaggacgccaggcttggaaggtgacgttgaggcagcagggggtaaaaagtggcgggccgggccctcccacggatgacagtgccttcccggaagccgctgcgcagggcccggcgtgtttgtggagtctctggcttgcacccagaatcgtgcg

SEQ ID NO: 12898 - DNA, 2 bp, Homo sapiens
cg

SEQ ID NO: 12899 - DNA, 2 bp, Homo sapiens
cg

SEQ ID NO: 12900 - DNA, 2 bp, Homo sapiens
cg

SEQ ID NO: 12901 - DNA, 2 bp, Homo sapiens
cg

SEQ ID NO: 12902 - DNA, 2 bp, Homo sapiens
cg

SEQ ID NO: 12903 - DNA, 2 bp, Homo sapiens
cg

SEQ ID NO: 12904 - DNA, 2 bp, Homo sapiens
cg

SEQ ID NO: 12905 - DNA, 2 bp, Homo sapiens
cg

SEQ ID NO: 12906 - DNA, 2 bp, Homo sapiens
cg

SEQ ID NO: 12907 - DNA, 2 bp, Homo sapiens
cg

SEQ ID NO: 12908 - DNA, 2 bp, Homo sapiens
cg

SEQ ID NO: 12909 - DNA, 9 bp, Homo sapiens
cgccattcg

SEQ ID NO: 12910 - DNA, 2 bp, Homo sapiens
cg

SEQ ID NO: 12911 - DNA, 2 bp, Homo sapiens
cg

SEQ ID NO: 12912 - DNA, 2 bp, Homo sapiens
cg

SEQ ID NO: 12913 - DNA, 2 bp, Homo sapiens
cg

SEQ ID NO: 12914 - DNA, 2 bp, Homo sapiens
cg

SEQ ID NO: 12915 - DNA, 2 bp, Homo sapiens
cg

SEQ ID NO: 12916 - DNA, 2 bp, Homo sapiens
cg

SEQ ID NO: 12917 - DNA, 2 bp, Homo sapiens
cg

SEQ ID NO: 12918 - DNA, 2 bp, Homo sapiens
cg

SEQ ID NO: 12919 - DNA, 2 bp, Homo sapiens
cg

SEQ ID NO: 12920 - DNA, 36 bp, Homo sapiens
cgcaggtcagtgggtgcgcgcaccctgcgtgagccg

SEQ ID NO: 12921 - DNA, 2 bp, Homo sapiens
cg

SEQ ID NO: 12922 - DNA, 2 bp, Homo sapiens
cg

SEQ ID NO: 12923 - DNA, 2 bp, Homo sapiens
cg

SEQ ID NO: 12924 - DNA, 2 bp, Homo sapiens
cg

SEQ ID NO: 12925 - DNA, 2 bp, Homo sapiens
cg

SEQ ID NO: 12926 - DNA, 2 bp, Homo sapiens
cg

SEQ ID NO: 12927 - DNA, 2 bp, Homo sapiens
cg

SEQ ID NO: 12928 - DNA, 2 bp, Homo sapiens
cg

SEQ ID NO: 12929 - DNA, 2 bp, Homo sapiens
cg

SEQ ID NO: 12930 - DNA, 2 bp, Homo sapiens
cg

SEQ ID NO: 12931 - DNA, 8 bp, Homo sapiens
cgccgtcg

SEQ ID NO: 12932 - DNA, 2 bp, Homo sapiens
cg

SEQ ID NO: 12933 - DNA, 2 bp, Homo sapiens
cg

SEQ ID NO: 12934 - DNA, 2 bp, Homo sapiens
cg

SEQ ID NO: 12935 - DNA, 2 bp, Homo sapiens
cg

SEQ ID NO: 12936 - DNA, 2 bp, Homo sapiens
cg

SEQ ID NO: 12937 - DNA, 2 bp, Homo sapiens
cg

SEQ ID NO: 12938 - DNA, 2 bp, Homo sapiens
cg

SEQ ID NO: 12939 - DNA, 2 bp, Homo sapiens
cg

SEQ ID NO: 12940 - DNA, 2 bp, Homo sapiens
cg

SEQ ID NO: 12941 - DNA, 2 bp, Homo sapiens
cg

SEQ ID NO: 12942 - DNA, 181 bp, Homo sapiens
cgattctcctgcctcagtctcccgagtagctgggactacaggcacacgccaccacgcccagctaatttttgtttgtttgtttatttatttattattatttttgagacggagtctcgctctgtcatcaggctggagtgccattggagtgcaatggcacgatctcggctcactgcaatctccg

SEQ ID NO: 12943 - DNA, 2 bp, Homo sapiens
cg

SEQ ID NO: 12944 - DNA, 2 bp, Homo sapiens
cg

SEQ ID NO: 12945 - DNA, 2 bp, Homo sapiens
cg

SEQ ID NO: 12946 - DNA, 2 bp, Homo sapiens
cg

SEQ ID NO: 12947 - DNA, 2 bp, Homo sapiens
cg

SEQ ID NO: 12948 - DNA, 2 bp, Homo sapiens
cg

SEQ ID NO: 12949 - DNA, 2 bp, Homo sapiens
cg

SEQ ID NO: 12950 - DNA, 2 bp, Homo sapiens
cg

SEQ ID NO: 12951 - DNA, 2 bp, Homo sapiens
cg

SEQ ID NO: 12952 - DNA, 2 bp, Homo sapiens
cg

SEQ ID NO: 12953 - DNA, 369 bp, Homo sapiens
cggggaggcttgggctgcacaggagcgcacggcgggggtggaggctcaggcatggagggctgcaggtcccgagccctgcccggcggggaggcagctaaggcccagcgagaagtcgagcacagcagctgctggcccaggtgctaagctcctcactgcccgggccggctggccgctccgagtgcggggcttgccaagcccacgcccacccggaactcgagctggcccgcaagcgcagcctgcagccacggttcccgcccacgcctctctctccacacctacccgcaagctgagggagccggctccagccttgtccagcccagaaaggggctcccacagtgcagcgacgggctgaagggctcctcaaacgcg

SEQ ID NO: 12954 - DNA, 2 bp, Homo sapiens
cg

SEQ ID NO: 12955 - DNA, 2 bp, Homo sapiens
cg

SEQ ID NO: 12956 - DNA, 2 bp, Homo sapiens
cg

SEQ ID NO: 12957 - DNA, 2 bp, Homo sapiens
cg

SEQ ID NO: 12958 - DNA, 2 bp, Homo sapiens
cg

SEQ ID NO: 12959 - DNA, 2 bp, Homo sapiens
cg

SEQ ID NO: 12960 - DNA, 2 bp, Homo sapiens
cg

SEQ ID NO: 12961 - DNA, 2 bp, Homo sapiens
cg

SEQ ID NO: 12962 - DNA, 2 bp, Homo sapiens
cg

SEQ ID NO: 12963 - DNA, 2 bp, Homo sapiens
cg

SEQ ID NO: 12964 - DNA, 2 bp, Homo sapiens
cg

SEQ ID NO: 12965 - DNA, 2 bp, Homo sapiens
cg

SEQ ID NO: 12966 - DNA, 2 bp, Homo sapiens
cg

SEQ ID NO: 12967 - DNA, 2 bp, Homo sapiens
cg

SEQ ID NO: 12968 - DNA, 2 bp, Homo sapiens
cg

SEQ ID NO: 12969 - DNA, 2 bp, Homo sapiens
cg

SEQ ID NO: 12970 - DNA, 2 bp, Homo sapiens
cg

SEQ ID NO: 12971 - DNA, 2 bp, Homo sapiens
cg

SEQ ID NO: 12972 - DNA, 2 bp, Homo sapiens
cg

SEQ ID NO: 12973 - DNA, 2 bp, Homo sapiens
cg

SEQ ID NO: 12974 - DNA, 2 bp, Homo sapiens
cg

SEQ ID NO: 12975 - DNA, 35 bp, Homo sapiens
cggtagtaaatgaagtcgaggtagtggtgcaagcg

SEQ ID NO: 12976 - DNA, 2 bp, Homo sapiens
cg

SEQ ID NO: 12977 - DNA, 2 bp, Homo sapiens
cg

SEQ ID NO: 12978 - DNA, 2 bp, Homo sapiens
cg

SEQ ID NO: 12979 - DNA, 2 bp, Homo sapiens
cg

SEQ ID NO: 12980 - DNA, 2 bp, Homo sapiens
cg

SEQ ID NO: 12981 - DNA, 2 bp, Homo sapiens
cg

SEQ ID NO: 12982 - DNA, 2 bp, Homo sapiens
cg

SEQ ID NO: 12983 - DNA, 2 bp, Homo sapiens
cg

SEQ ID NO: 12984 - DNA, 2 bp, Homo sapiens
cg

SEQ ID NO: 12985 - DNA, 2 bp, Homo sapiens
cg

SEQ ID NO: 12986 - DNA, 487 bp, Homo sapiens
cgccctttgcctgttctaaagggcaaggtctctccgcctcgcgccccgcctctgtcccacccaggccccgccaccatgttcgggggccccacccgggactggcttctgtcctgcgcagcaaacccggaagtggatcacgtggagtaaaggtcctaccgaggcgcgtgagttttgctctgccttgtattaagtctgcacttcccaggtccctggcacttctgtccctgggacgtggggtcctcacagacctggaaattcttgcctgtcttccttcacccagagcaaattgagacgcccataagagtctggaagttgcttccttttgggtttgaagtcgcttggaggctggtcccgtccccggtctttctgctatagggcaatgtatacacttcctatcgcatagttttcctgctcaaaaccttgttgactcatcctgccccttgctttttaaagtcctcacccgtgcgctggattcccgccctgggcg

SEQ ID NO: 12987 - DNA, 2 bp, Homo sapiens
cg

SEQ ID NO: 12988 - DNA, 2 bp, Homo sapiens
cg

SEQ ID NO: 12989 - DNA, 2 bp, Homo sapiens
cg

SEQ ID NO: 12990 - DNA, 2 bp, Homo sapiens
cg

SEQ ID NO: 12991 - DNA, 2 bp, Homo sapiens
cg

SEQ ID NO: 12992 - DNA, 2 bp, Homo sapiens
cg

SEQ ID NO: 12993 - DNA, 2 bp, Homo sapiens
cg

SEQ ID NO: 12994 - DNA, 2 bp, Homo sapiens
cg

SEQ ID NO: 12995 - DNA, 2 bp, Homo sapiens
cg

SEQ ID NO: 12996 - DNA, 2 bp, Homo sapiens
cg

SEQ ID NO: 12997 - DNA, 28 bp, Homo sapiens
cggatcacgaggtcaggagatcaagacg

SEQ ID NO: 12998 - DNA, 2 bp, Homo sapiens
cg

SEQ ID NO: 12999 - DNA, 2 bp, Homo sapiens
cg

SEQ ID NO: 13000 - DNA, 2 bp, Homo sapiens
cg

SEQ ID NO: 13001 - DNA, 2 bp, Homo sapiens
cg

SEQ ID NO: 13002 - DNA, 2 bp, Homo sapiens
cg

SEQ ID NO: 13003 - DNA, 2 bp, Homo sapiens
cg

SEQ ID NO: 13004 - DNA, 2 bp, Homo sapiens
cg

SEQ ID NO: 13005 - DNA, 2 bp, Homo sapiens
cg

SEQ ID NO: 13006 - DNA, 2 bp, Homo sapiens
cg

SEQ ID NO: 13007 - DNA, 2 bp, Homo sapiens
cg

SEQ ID NO: 13008 - DNA, 2 bp, Homo sapiens
cg

SEQ ID NO: 13009 - DNA, 2 bp, Homo sapiens
cg

SEQ ID NO: 13010 - DNA, 2 bp, Homo sapiens
cg

SEQ ID NO: 13011 - DNA, 2 bp, Homo sapiens
cg

SEQ ID NO: 13012 - DNA, 2 bp, Homo sapiens
cg

SEQ ID NO: 13013 - DNA, 2 bp, Homo sapiens
cg

SEQ ID NO: 13014 - DNA, 2 bp, Homo sapiens
cg

SEQ ID NO: 13015 - DNA, 2 bp, Homo sapiens
cg

SEQ ID NO: 13016 - DNA, 2 bp, Homo sapiens
cg

SEQ ID NO: 13017 - DNA, 2 bp, Homo sapiens
cg

SEQ ID NO: 13018 - DNA, 2 bp, Homo sapiens
cg

SEQ ID NO: 13019 - DNA, 18 bp, Homo sapiens
cgcggtcaggaaggcgcg

SEQ ID NO: 13020 - DNA, 18 bp, Homo sapiens
cgcactcactgacctgcg

SEQ ID NO: 13021 - DNA, 2 bp, Homo sapiens
cg

SEQ ID NO: 13022 - DNA, 2 bp, Homo sapiens
cg

SEQ ID NO: 13023 - DNA, 2 bp, Homo sapiens
cg

SEQ ID NO: 13024 - DNA, 2 bp, Homo sapiens
cg

SEQ ID NO: 13025 - DNA, 2 bp, Homo sapiens
cg

SEQ ID NO: 13026 - DNA, 2 bp, Homo sapiens
cg

SEQ ID NO: 13027 - DNA, 2 bp, Homo sapiens
cg

SEQ ID NO: 13028 - DNA, 2 bp, Homo sapiens
cg

SEQ ID NO: 13029 - DNA, 2 bp, Homo sapiens
cg

SEQ ID NO: 13030 - DNA, 2 bp, Homo sapiens
cg

SEQ ID NO: 13031 - DNA, 87 bp, Homo sapiens
cgtcacccatttatttgactcggaaagggaactctctgaccccttgcgcttcccaggtgaggcaatgcctcgccctgcttcggctcg

SEQ ID NO: 13032 - DNA, 2 bp, Homo sapiens
cg

SEQ ID NO: 13033 - DNA, 2 bp, Homo sapiens
cg

SEQ ID NO: 13034 - DNA, 2 bp, Homo sapiens
cg

SEQ ID NO: 13035 - DNA, 2 bp, Homo sapiens
cg

SEQ ID NO: 13036 - DNA, 2 bp, Homo sapiens
cg

SEQ ID NO: 13037 - DNA, 2 bp, Homo sapiens
cg

SEQ ID NO: 13038 - DNA, 2 bp, Homo sapiens
cg

SEQ ID NO: 13039 - DNA, 2 bp, Homo sapiens
cg

SEQ ID NO: 13040 - DNA, 2 bp, Homo sapiens
cg

SEQ ID NO: 13041 - DNA, 2 bp, Homo sapiens
cg

SEQ ID NO: 13042 - DNA, 11 bp, Homo sapiens
cgcaagctccg

SEQ ID NO: 13043 - DNA, 2 bp, Homo sapiens
cg

SEQ ID NO: 13044 - DNA, 2 bp, Homo sapiens
cg

SEQ ID NO: 13045 - DNA, 2 bp, Homo sapiens
cg

SEQ ID NO: 13046 - DNA, 2 bp, Homo sapiens
cg

SEQ ID NO: 13047 - DNA, 2 bp, Homo sapiens
cg

SEQ ID NO: 13048 - DNA, 2 bp, Homo sapiens
cg

SEQ ID NO: 13049 - DNA, 2 bp, Homo sapiens
cg

SEQ ID NO: 13050 - DNA, 2 bp, Homo sapiens
cg

SEQ ID NO: 13051 - DNA, 2 bp, Homo sapiens
cg

SEQ ID NO: 13052 - DNA, 2 bp, Homo sapiens
cg

SEQ ID NO: 13053 - DNA, 2 bp, Homo sapiens
cg

SEQ ID NO: 13054 - DNA, 2 bp, Homo sapiens
cg

SEQ ID NO: 13055 - DNA, 2 bp, Homo sapiens
cg

SEQ ID NO: 13056 - DNA, 2 bp, Homo sapiens
cg

SEQ ID NO: 13057 - DNA, 2 bp, Homo sapiens
cg

SEQ ID NO: 13058 - DNA, 2 bp, Homo sapiens
cg

SEQ ID NO: 13059 - DNA, 2 bp, Homo sapiens
cg

SEQ ID NO: 13060 - DNA, 2 bp, Homo sapiens
cg

SEQ ID NO: 13061 - DNA, 2 bp, Homo sapiens
cg

SEQ ID NO: 13062 - DNA, 167 bp, Homo sapiens
cgccattttttaagccggtctgaaaagcgcaatattcgggtgggagtgacccgattttctaggtgcgtcggtcacccctttccttgactcggaaagggaactccctgacccctggcgcttcccaggtgaggcaatgcctcgccctgcttcggctcgcccacggtgcg

SEQ ID NO: 13063 - DNA, 2 bp, Homo sapiens
cg

SEQ ID NO: 13064 - DNA, 2 bp, Homo sapiens
cg

SEQ ID NO: 13065 - DNA, 2 bp, Homo sapiens
cg

SEQ ID NO: 13066 - DNA, 185 bp, Homo sapiens
cggtgcttacatacgctgcttttaaaaaaatttgctttgttcaggtttgtgtgaatacaacgccggatgaactctgtcccttcagaagaaagccgggttggtgtgctcgatgacgcagcgcttgcagtggcgtttgacaaagcgcagggcctccacggagacctcgcagtcctggacattcagcg

SEQ ID NO: 13067 - DNA, 17 bp, Homo sapiens
cgccctgcttcggctcg

SEQ ID NO: 13068 - DNA, 135 bp, Homo sapiens
cgcaatattcgggtgggagtgacccgattttccaggtgcgtccgtcacccctttctttgactaggaaagggaactccctgacccctggcgcttcccgagtgaggcattgccttaccctgcttcggctcgcgcacg

SEQ ID NO: 13069 - DNA, 2 bp, Homo sapiens
cg

SEQ ID NO: 13070 - DNA, 71 bp, Homo sapiens
cggcgggctgaagggctcctcaagcgcggccagagtgggtgccaaggccgaggaggcgccaagagcgagcg

SEQ ID NO: 13071 - DNA, 54 bp, Homo sapiens
cgcttcccaagtgaggcaatgcctcgccctgcttcggctcgcgcacggtgcgcg

SEQ ID NO: 13072 - DNA, 5 bp, Homo sapiens
cgccg

SEQ ID NO: 13073 - DNA, 29 bp, Homo sapiens
cgcttttcctacgggcttaaaaaccggcg

SEQ ID NO: 13074 - DNA, 18 bp, Homo sapiens
cgcagacactagaaagcg

SEQ ID NO: 13075 - DNA, 2 bp, Homo sapiens
cg

SEQ ID NO: 13076 - DNA, 5 bp, Homo sapiens
cgtcg

SEQ ID NO: 13077 - DNA, 24 bp, Homo sapiens
cgagtctgcgcaggaggcgcttcg

SEQ ID NO: 13078 - DNA, 2 bp, Homo sapiens
cg

SEQ ID NO: 13079 - DNA, 4 bp, Homo sapiens
cgcg

SEQ ID NO: 13080 - DNA, 2 bp, Homo sapiens
cg

SEQ ID NO: 13081 - DNA, 2 bp, Homo sapiens
cg

SEQ ID NO: 13082 - DNA, 2 bp, Homo sapiens
cg

SEQ ID NO: 13083 - DNA, 2 bp, Homo sapiens
cg

SEQ ID NO: 13084 - DNA, 2 bp, Homo sapiens
cg

SEQ ID NO: 13085 - DNA, 2 bp, Homo sapiens
cg

SEQ ID NO: 13086 - DNA, 2 bp, Homo sapiens
cg

SEQ ID NO: 13087 - DNA, 2 bp, Homo sapiens
cg

SEQ ID NO: 13088 - DNA, 2 bp, Homo sapiens
cg

SEQ ID NO: 13089 - DNA, 2 bp, Homo sapiens
cg

SEQ ID NO: 13090 - DNA, 12 bp, Homo sapiens
cgacctgccccg

SEQ ID NO: 13091 - DNA, 2 bp, Homo sapiens
cg

SEQ ID NO: 13092 - DNA, 2 bp, Homo sapiens
cg

SEQ ID NO: 13093 - DNA, 2 bp, Homo sapiens
cg

SEQ ID NO: 13094 - DNA, 2 bp, Homo sapiens
cg

SEQ ID NO: 13095 - DNA, 2 bp, Homo sapiens
cg

SEQ ID NO: 13096 - DNA, 2 bp, Homo sapiens
cg

SEQ ID NO: 13097 - DNA, 2 bp, Homo sapiens
cg

SEQ ID NO: 13098 - DNA, 2 bp, Homo sapiens
cg

SEQ ID NO: 13099 - DNA, 2 bp, Homo sapiens
cg

SEQ ID NO: 13100 - DNA, 2 bp, Homo sapiens
cg

SEQ ID NO: 13101 - DNA, 2 bp, Homo sapiens
cg

SEQ ID NO: 13102 - DNA, 2 bp, Homo sapiens
cg

SEQ ID NO: 13103 - DNA, 2 bp, Homo sapiens
cg

SEQ ID NO: 13104 - DNA, 2 bp, Homo sapiens
cg

SEQ ID NO: 13105 - DNA, 2 bp, Homo sapiens
cg

SEQ ID NO: 13106 - DNA, 2 bp, Homo sapiens
cg

SEQ ID NO: 13107 - DNA, 2 bp, Homo sapiens
cg

SEQ ID NO: 13108 - DNA, 2 bp, Homo sapiens
cg

SEQ ID NO: 13109 - DNA, 2 bp, Homo sapiens
cg

SEQ ID NO: 13110 - DNA, 2 bp, Homo sapiens
cg

SEQ ID NO: 13111 - DNA, 2 bp, Homo sapiens
cg

SEQ ID NO: 13112 - DNA, 80 bp, Homo sapiens
cgcagcggaaggcctggagcagaggctgcttctccgcccaagcactccctgggtgagtccatactcctggcgcgagtacg

SEQ ID NO: 13113 - DNA, 2 bp, Homo sapiens
cg

SEQ ID NO: 13114 - DNA, 2 bp, Homo sapiens
cg

SEQ ID NO: 13115 - DNA, 2 bp, Homo sapiens
cg

SEQ ID NO: 13116 - DNA, 2 bp, Homo sapiens
cg

SEQ ID NO: 13117 - DNA, 2 bp, Homo sapiens
cg

SEQ ID NO: 13118 - DNA, 2 bp, Homo sapiens
cg

SEQ ID NO: 13119 - DNA, 2 bp, Homo sapiens
cg

SEQ ID NO: 13120 - DNA, 2 bp, Homo sapiens
cg

SEQ ID NO: 13121 - DNA, 2 bp, Homo sapiens
cg

SEQ ID NO: 13122 - DNA, 2 bp, Homo sapiens
cg

SEQ ID NO: 13123 - DNA, 4 bp, Homo sapiens
cgcg

SEQ ID NO: 13124 - DNA, 2 bp, Homo sapiens
cg

SEQ ID NO: 13125 - DNA, 2 bp, Homo sapiens
cg

SEQ ID NO: 13126 - DNA, 2 bp, Homo sapiens
cg

SEQ ID NO: 13127 - DNA, 2 bp, Homo sapiens
cg

SEQ ID NO: 13128 - DNA, 2 bp, Homo sapiens
cg

SEQ ID NO: 13129 - DNA, 2 bp, Homo sapiens
cg

SEQ ID NO: 13130 - DNA, 2 bp, Homo sapiens
cg

SEQ ID NO: 13131 - DNA, 2 bp, Homo sapiens
cg

SEQ ID NO: 13132 - DNA, 2 bp, Homo sapiens
cg

SEQ ID NO: 13133 - DNA, 2 bp, Homo sapiens
cg

SEQ ID NO: 13134 - DNA, 3039 bp, Homo sapiens
cgcacgattctgggtgcaagccagagactccacaaacacgccgggccctgcgcagcggcttccgggaaggcactgtcatccgtgggagggcccggcccgccactttttaccccctgctgcctcaacgtcaccttccaagcctggcgtcctcttcccttcccctggaggccttcgtgctgctttggggtgccccctgtgggcgagacacacaacctgggtgcaagccagggactccgcgaccatccctggcccggcgcaggggtggccatccttgggacgacaccatcccgccacttttttccttggactgtctccactatccccttcaaccctggcgtcctgtacccttcccccagtggccttcttgccgctttgtggtgctccccgtgggtgagacacgcacccggggtgcaagacagggactccaggacgctcccgggcccactgcagaggctgctgggaaggcagtgtcgtccgtgagaggaccccagcatccccgctttttttccccggggctgcctcaacttcccccttcaagactgacgtgctgtccctttcccccgggaaccttcttgctgctttgtggtgcccgccgtgggcaagacactcaccctgggtgcaagccagggaatcaacaacccccgcatgcccggcaaaggggctgccggtaaggcactgtcattcgtgggatcaccccagcctcgctgcttttttctccaggctacctaaacgtccccattcaagcctggcgtcctgttgccttcccgcgggggacttcttgccactttggggtgccccccgtgggcgagacacgcacattgtgtgcaagacagggactccgcgaccctcccgggactggcataggggctgtagggaaggcactgtcatccgtgaaaggaccccagcctcgcccctttttttcctgggctgcctcaacgtcccctttcaagtctggcatcctgttcttccccccccggggctttcttgctgctttggggtgccacccgtgggcgaggcacgcaccctgggtgtaaaccagggactccaagacccccagggccaggcgcaggggatgtcgggaagtcactgtcctccgtggaaagtttttccctggactgcctcaaagtcccctttcaagcctggcatcctgttcccttcccccggagcccttcttgcagctttcgcgtgcacacttaggcgagacacgcactctgttgcaagacagggactccaaacccccccgcctgggccaggctcaggggctgccgggaaggcactgtggtctgtgggacgaccacagcctagccgctgttttcctctggctggcccaacgtccctcttcaagcctgacatgttgtccccttcccccgggggccctgttgccactttcacgtgcaccccgtgagcaagacaggcaccctgggtccaagccaggggctccaccgtccacctgggtcccactcagaggctgccgggaaggcactgttctcagtggaaattttttccccggactgcctcaacgtcccctttcaagctcggcgtcctgttcccttccactcggggacttcttaccgcattgcggtgcccatcgtgggcacgacacgcaccccgggtgcaagccagggactccacaaccaccccaggcccgatgcaggggctaccggacaagacactgttgtccttgggatgacaccggtctgcctcaactctacctttcaaccctggagtcctgtacccttcccctgggggccttcttgctgctttgtggtgccactcgtgggcgagacacacaacctgggagcaagccagagactccacgacacctctgggcccactgcagaggctgccaggaaggcggtgtcatccgtgggaggaccccagcttcaccacttttaccccggggccgcctcaacctccccttcaagcctgacgtgctctcccttcccccgggaatctacttgccgctttggggtgcccccttgagcgagacacgcaccctgggtgcaagccacggactccaggaccaccctggcccagcgaaggggctgccaggaaggcactgtcgtttgtgggagaaactcagcgtcgccgtttttttccacgggctacctcaaagtcccccttcaagtctgaggtgctgtccccttcccccaggggcctacttgccgctttggggtgcctcccatgggcgaaacacgcaccctgggtgcaagatagggactccacgatccccccgggcccagcgcagggactgccaggaaggcactgtcatccgtaggaggaacccgactagccgcttttctctctgtgctgcctcagcatccccattaaagcctggccttctgtggcgttcgcccggcggccttcttgccactttggggtgcccccatgggtgcgacccgcaccctcggtgcaagccagggactccacgaccaccccgggcctgacgcaggggctgctgggaaggcactgtcgtccatgggacgaccccagcctgccacgtttttccccggactgcctcaactatccctttcaaccctggcgtcccatacccttcccccggtggccttcttgccgctttgtggtgccccccgagggcgagacacgcaccttgggtgcaagccaaggactccatgacgctcccaggcccaccacagatgctgtcgggaagacagtgttatccgtggcaggaccccagcatcccctctttattcccggggctgcctcaacgtccccctccaagcctgacgtgctgtccccttcccctgggaacctacttgccgctttggggtgccccccgtggaaccctgggtgcaagcctgggacacaacaaccccctcgggcctggcaaaggggctgccgggaaggcaccgtggtccgtgggaagttttttcctggactgcttcaaagtcccctttcaagcctggcgtcctgttcccttcccagggggcattcttgccgctttggggtgtccccccgtgggcgcgacacgcaccctgggttcaagtcaggaactccacgacaaccccgagtctggcg

SEQ ID NO: 13135 - DNA, 2 bp, Homo sapiens
cg

SEQ ID NO: 13136 - DNA, 2 bp, Homo sapiens
cg

SEQ ID NO: 13137 - DNA, 2 bp, Homo sapiens
cg

SEQ ID NO: 13138 - DNA, 2 bp, Homo sapiens
cg

SEQ ID NO: 13139 - DNA, 2 bp, Homo sapiens
cg

SEQ ID NO: 13140 - DNA, 2 bp, Homo sapiens
cg

SEQ ID NO: 13141 - DNA, 2 bp, Homo sapiens
cg

SEQ ID NO: 13142 - DNA, 2 bp, Homo sapiens
cg

SEQ ID NO: 13143 - DNA, 2 bp, Homo sapiens
cg

SEQ ID NO: 13144 - DNA, 2 bp, Homo sapiens
cg

SEQ ID NO: 13145 - DNA, 2 bp, Artificial Sequence
  Description of Artificial Sequence: Synthetic oligonucleotide
yg

SEQ ID NO: 13146 - DNA, 9 bp, Artificial Sequence
  Description of Artificial Sequence: Synthetic oligonucleotide
ygaatggyg

SEQ ID NO: 13147 - DNA, 2 bp, Artificial Sequence
  Description of Artificial Sequence: Synthetic oligonucleotide
yg

SEQ ID NO: 13148 - DNA, 2 bp, Artificial Sequence
  Description of Artificial Sequence: Synthetic oligonucleotide
yg

SEQ ID NO: 13149 - DNA, 2 bp, Artificial Sequence
  Description of Artificial Sequence: Synthetic oligonucleotide
yg

SEQ ID NO: 13150 - DNA, 2 bp, Artificial Sequence
  Description of Artificial Sequence: Synthetic oligonucleotide
yg

SEQ ID NO: 13151 - DNA, 2 bp, Artificial Sequence
  Description of Artificial Sequence: Synthetic oligonucleotide
yg

SEQ ID NO: 13152 - DNA, 2 bp, Artificial Sequence
  Description of Artificial Sequence: Synthetic oligonucleotide
yg

SEQ ID NO: 13153 - DNA, 2 bp, Artificial Sequence
  Description of Artificial Sequence: Synthetic oligonucleotide
yg

SEQ ID NO: 13154 - DNA, 2 bp, Artificial Sequence
  Description of Artificial Sequence: Synthetic oligonucleotide
yg

SEQ ID NO: 13155 - DNA, 2 bp, Artificial Sequence
  Description of Artificial Sequence: Synthetic oligonucleotide
yg

SEQ ID NO: 13156 - DNA, 2 bp, Artificial Sequence
  Description of Artificial Sequence: Synthetic oligonucleotide
yg

SEQ ID NO: 13157 - DNA, 36 bp, Artificial Sequence
  Description of Artificial Sequence: Synthetic oligonucleotide
yggtttaygtagggtgygygtatttattgatttgyg

SEQ ID NO: 13158 - DNA, 2 bp, Artificial Sequence
  Description of Artificial Sequence: Synthetic oligonucleotide
yg

SEQ ID NO: 13159 - DNA, 2 bp, Artificial Sequence
  Description of Artificial Sequence: Synthetic oligonucleotide
yg

SEQ ID NO: 13160 - DNA, 2 bp, Artificial Sequence
  Description of Artificial Sequence: Synthetic oligonucleotide
yg

SEQ ID NO: 13161 - DNA, 2 bp, Artificial Sequence
  Description of Artificial Sequence: Synthetic oligonucleotide
yg

SEQ ID NO: 13162 - DNA, 2 bp, Artificial Sequence
  Description of Artificial Sequence: Synthetic oligonucleotide
yg

SEQ ID NO: 13163 - DNA, 2 bp, Artificial Sequence
  Description of Artificial Sequence: Synthetic oligonucleotide
yg

SEQ ID NO: 13164 - DNA, 2 bp, Artificial Sequence
  Description of Artificial Sequence: Synthetic oligonucleotide
yg

SEQ ID NO: 13165 - DNA, 2 bp, Artificial Sequence
  Description of Artificial Sequence: Synthetic oligonucleotide
yg

SEQ ID NO: 13166 - DNA, 2 bp, Artificial Sequence
  Description of Artificial Sequence: Synthetic oligonucleotide
yg

SEQ ID NO: 13167 - DNA, 2 bp, Artificial Sequence
  Description of Artificial Sequence: Synthetic oligonucleotide
yg

SEQ ID NO: 13168 - DNA, 8 bp, Artificial Sequence
  Description of Artificial Sequence: Synthetic oligonucleotide
ygayggyg

SEQ ID NO: 13169 - DNA, 2 bp, Artificial Sequence
  Description of Artificial Sequence: Synthetic oligonucleotide
yg

SEQ ID NO: 13170 - DNA, 2 bp, Artificial Sequence
  Description of Artificial Sequence: Synthetic oligonucleotide
yg

SEQ ID NO: 13171 - DNA, 2 bp, Artificial Sequence
  Description of Artificial Sequence: Synthetic oligonucleotide
yg

SEQ ID NO: 13172 - DNA, 2 bp, Artificial Sequence
  Description of Artificial Sequence: Synthetic oligonucleotide
yg

SEQ ID NO: 13173 - DNA, 2 bp, Artificial Sequence
  Description of Artificial Sequence: Synthetic oligonucleotide
yg

SEQ ID NO: 13174 - DNA, 2 bp, Artificial Sequence
  Description of Artificial Sequence: Synthetic oligonucleotide
yg

SEQ ID NO: 13175 - DNA, 2 bp, Artificial Sequence
  Description of Artificial Sequence: Synthetic oligonucleotide
yg

SEQ ID NO: 13176 - DNA, 2 bp, Artificial Sequence
  Description of Artificial Sequence: Synthetic oligonucleotide
yg

SEQ ID NO: 13177 - DNA, 2 bp, Artificial Sequence
  Description of Artificial Sequence: Synthetic oligonucleotide
yg

SEQ ID NO: 13178 - DNA, 2 bp, Artificial Sequence
  Description of Artificial Sequence: Synthetic oligonucleotide
yg

SEQ ID NO: 13179 - DNA, 181 bp, Artificial Sequence
  Description of Artificial Sequence: Synthetic polynucleotide
yggagattgtagtgagtygagatygtgttattgtattttaatggtattttagtttgatgatagagygagatttygttttaaaaataataataaataaataaataaataaataaaaattagttgggygtggtggygtgtgtttgtagttttagttattygggagattgaggtaggagaatyg

SEQ ID NO: 13180 - DNA, 2 bp, Artificial Sequence
  Description of Artificial Sequence: Synthetic oligonucleotide
yg

SEQ ID NO: 13181 - DNA, 2 bp, Artificial Sequence
  Description of Artificial Sequence: Synthetic oligonucleotide
yg

SEQ ID NO: 13182 - DNA, 2 bp, Artificial Sequence
  Description of Artificial Sequence: Synthetic oligonucleotide
yg

SEQ ID NO: 13183 - DNA, 2 bp, Artificial Sequence
  Description of Artificial Sequence: Synthetic oligonucleotide
yg

SEQ ID NO: 13184 - DNA, 2 bp, Artificial Sequence
  Description of Artificial Sequence: Synthetic oligonucleotide
yg

SEQ ID NO: 13185 - DNA, 2 bp, Artificial Sequence
  Description of Artificial Sequence: Synthetic oligonucleotide
yg

SEQ ID NO: 13186 - DNA, 2 bp, Artificial Sequence
  Description of Artificial Sequence: Synthetic oligonucleotide
yg

SEQ ID NO: 13187 - DNA, 2 bp, Artificial Sequence
  Description of Artificial Sequence: Synthetic oligonucleotide
yg

SEQ ID NO: 13188 - DNA, 2 bp, Artificial Sequence
  Description of Artificial Sequence: Synthetic oligonucleotide
yg

SEQ ID NO: 13189 - DNA, 2 bp, Artificial Sequence
  Description of Artificial Sequence: Synthetic oligonucleotide
yg

SEQ ID NO: 13190 - DNA, 369 bp, Artificial Sequence
  Description of Artificial Sequence: Synthetic polynucleotide
ygygtttgaggagttttttagttygtygttgtattgtgggagtttttttttgggttggataaggttggagtyggtttttttagtttgygggtaggtgtggagagagaggygtgggygggaatygtggttgtaggttgygtttgygggttagttygagtttygggtgggygtgggtttggtaagtttygtattyggagyggttagtyggttygggtagtgaggagtttagtatttgggttagtagttgttgtgttygatttttygttgggttttagttgttttttygtygggtagggttygggatttgtagttttttatgtttgagtttttattttygtygtgygtttttgtgtagtttaagttttttyg

SEQ ID NO: 13191 - DNA, 2 bp, Artificial Sequence
  Description of Artificial Sequence: Synthetic oligonucleotide
yg

SEQ ID NO: 13192 - DNA, 2 bp, Artificial Sequence
  Description of Artificial Sequence: Synthetic oligonucleotide
yg

SEQ ID NO: 13193 - DNA, 2 bp, Artificial Sequence
  Description of Artificial Sequence: Synthetic oligonucleotide
yg

SEQ ID NO: 13194 - DNA, 2 bp, Artificial Sequence
  Description of Artificial Sequence: Synthetic oligonucleotide
yg

SEQ ID NO: 13195 - DNA, 2 bp, Artificial Sequence
  Description of Artificial Sequence: Synthetic oligonucleotide
yg

SEQ ID NO: 13196 - DNA, 2 bp, Artificial Sequence
  Description of Artificial Sequence: Synthetic oligonucleotide
yg

SEQ ID NO: 13197 - DNA, 2 bp, Artificial Sequence
  Description of Artificial Sequence: Synthetic oligonucleotide
yg

SEQ ID NO: 13198 - DNA, 2 bp, Artificial Sequence
  Description of Artificial Sequence: Synthetic oligonucleotide
yg

SEQ ID NO: 13199 - DNA, 2 bp, Artificial Sequence
  Description of Artificial Sequence: Synthetic oligonucleotide
yg

SEQ ID NO: 13200 - DNA, 2 bp, Artificial Sequence
  Description of Artificial Sequence: Synthetic oligonucleotide
yg

SEQ ID NO: 13201 - DNA, 2 bp, Artificial Sequence
  Description of Artificial Sequence: Synthetic oligonucleotide
yg

SEQ ID NO: 13202 - DNA, 2 bp, Artificial Sequence
  Description of Artificial Sequence: Synthetic oligonucleotide
yg

SEQ ID NO: 13203 - DNA, 2 bp, Artificial Sequence
  Description of Artificial Sequence: Synthetic oligonucleotide
yg

SEQ ID NO: 13204 - DNA, 2 bp, Artificial Sequence
  Description of Artificial Sequence: Synthetic oligonucleotide
yg

SEQ ID NO: 13205 - DNA, 2 bp, Artificial Sequence
  Description of Artificial Sequence: Synthetic oligonucleotide
yg

SEQ ID NO: 13206 - DNA, 2 bp, Artificial Sequence
  Description of Artificial Sequence: Synthetic oligonucleotide
yg

SEQ ID NO: 13207 - DNA, 2 bp, Artificial Sequence
  Description of Artificial Sequence: Synthetic oligonucleotide
yg

SEQ ID NO: 13208 - DNA, 2 bp, Artificial Sequence
  Description of Artificial Sequence: Synthetic oligonucleotide
yg

SEQ ID NO: 13209 - DNA, 2 bp, Artificial Sequence
  Description of Artificial Sequence: Synthetic oligonucleotide
yg

SEQ ID NO: 13210 - DNA, 2 bp, Artificial Sequence
  Description of Artificial Sequence: Synthetic oligonucleotide
yg

SEQ ID NO: 13211 - DNA, 2 bp, Artificial Sequence
  Description of Artificial Sequence: Synthetic oligonucleotide
yg

SEQ ID NO: 13212 - DNA, 35 bp, Artificial Sequence
  Description of Artificial Sequence: Synthetic oligonucleotide
ygtttgtattattatttygattttatttattatyg

SEQ ID NO: 13213 - DNA, 2 bp, Artificial Sequence
  Description of Artificial Sequence: Synthetic oligonucleotide
yg

SEQ ID NO: 13214 - DNA, 2 bp, Artificial Sequence
  Description of Artificial Sequence: Synthetic oligonucleotide
yg

SEQ ID NO: 13215 - DNA, 2 bp, Artificial Sequence
  Description of Artificial Sequence: Synthetic oligonucleotide
yg

SEQ ID NO: 13216 - DNA, 2 bp, Artificial Sequence
  Description of Artificial Sequence: Synthetic oligonucleotide
yg

SEQ ID NO: 13217 - DNA, 2 bp, Artificial Sequence
  Description of Artificial Sequence: Synthetic oligonucleotide
yg

SEQ ID NO: 13218 - DNA, 2 bp, Artificial Sequence
  Description of Artificial Sequence: Synthetic oligonucleotide
yg

SEQ ID NO: 13219 - DNA, 2 bp, Artificial Sequence
  Description of Artificial Sequence: Synthetic oligonucleotide
yg

SEQ ID NO: 13220 - DNA, 2 bp, Artificial Sequence
  Description of Artificial Sequence: Synthetic oligonucleotide
yg

SEQ ID NO: 13221 - DNA, 2 bp, Artificial Sequence
  Description of Artificial Sequence: Synthetic oligonucleotide
yg

SEQ ID NO: 13222 - DNA, 2 bp, Artificial Sequence
  Description of Artificial Sequence: Synthetic oligonucleotide
yg

SEQ ID NO: 13223 - DNA, 487 bp, Artificial Sequence
  Description of Artificial Sequence: Synthetic polynucleotide
ygtttagggygggaatttagygtaygggtgaggattttaaaaagtaaggggtaggatgagttaataaggttttgagtaggaaaattatgygataggaagtgtatatattgttttatagtagaaagatyggggaygggattagtttttaagygattttaaatttaaaaggaagtaatttttagatttttatgggygttttaatttgttttgggtgaaggaagataggtaagaatttttaggtttgtgaggattttaygttttagggatagaagtgttagggatttgggaagtgtagatttaatataaggtagagtaaaatttaygygtttyggtaggatttttattttaygtgatttattttygggtttgttgygtaggatagaagttagtttygggtggggttttygaatatggtggyggggtttgggtgggatagaggyggggygygaggyggagagattttgttttttagaataggtaaagggyg

SEQ ID NO: 13224 - DNA, 2 bp, Artificial Sequence
  Description of Artificial Sequence: Synthetic oligonucleotide
yg

SEQ ID NO: 13225 - DNA, 2 bp, Artificial Sequence
  Description of Artificial Sequence: Synthetic oligonucleotide
yg

SEQ ID NO: 13226 - DNA, 2 bp, Artificial Sequence
  Description of Artificial Sequence: Synthetic oligonucleotide
yg

SEQ ID NO: 13227 - DNA, 2 bp, Artificial Sequence
  Description of Artificial Sequence: Synthetic oligonucleotide
yg

SEQ ID NO: 13228 - DNA, 2 bp, Artificial Sequence
  Description of Artificial Sequence: Synthetic oligonucleotide
yg

SEQ ID NO: 13229 - DNA, 2 bp, Artificial Sequence
  Description of Artificial Sequence: Synthetic oligonucleotide
yg

SEQ ID NO: 13230 - DNA, 2 bp, Artificial Sequence
  Description of Artificial Sequence: Synthetic oligonucleotide
yg

SEQ ID NO: 13231 - DNA, 2 bp, Artificial Sequence
  Description of Artificial Sequence: Synthetic oligonucleotide
yg

SEQ ID NO: 13232 - DNA, 2 bp, Artificial Sequence
  Description of Artificial Sequence: Synthetic oligonucleotide
yg

SEQ ID NO: 13233 - DNA, 2 bp, Artificial Sequence
  Description of Artificial Sequence: Synthetic oligonucleotide
yg

SEQ ID NO: 13234 - DNA, 28 bp, Artificial Sequence
  Description of Artificial Sequence: Synthetic oligonucleotide
ygttttgattttttgatttygtgattyg

SEQ ID NO: 13235 - DNA, 2 bp, Artificial Sequence
  Description of Artificial Sequence: Synthetic oligonucleotide
yg

SEQ ID NO: 13236 - DNA, 2 bp, Artificial Sequence
  Description of Artificial Sequence: Synthetic oligonucleotide
yg

SEQ ID NO: 13237 - DNA, 2 bp, Artificial Sequence
  Description of Artificial Sequence: Synthetic oligonucleotide
yg

SEQ ID NO: 13238 - DNA, 2 bp, Artificial Sequence
  Description of Artificial Sequence: Synthetic oligonucleotide
yg

SEQ ID NO: 13239 - DNA, 2 bp, Artificial Sequence
  Description of Artificial Sequence: Synthetic oligonucleotide
yg

SEQ ID NO: 13240 - DNA, 2 bp, Artificial Sequence
  Description of Artificial Sequence: Synthetic oligonucleotide
yg

SEQ ID NO: 13241 - DNA, 2 bp, Artificial Sequence
  Description of Artificial Sequence: Synthetic oligonucleotide
yg

SEQ ID NO: 13242 - DNA, 2 bp, Artificial Sequence
  Description of Artificial Sequence: Synthetic oligonucleotide
yg

SEQ ID NO: 13243 - DNA, 2 bp, Artificial Sequence
  Description of Artificial Sequence: Synthetic oligonucleotide
yg

SEQ ID NO: 13244 - DNA, 2 bp, Artificial Sequence
  Description of Artificial Sequence: Synthetic oligonucleotide
yg

SEQ ID NO: 13245 - DNA, 2 bp, Artificial Sequence
  Description of Artificial Sequence: Synthetic oligonucleotide
yg

SEQ ID NO: 13246 - DNA, 2 bp, Artificial Sequence
  Description of Artificial Sequence: Synthetic oligonucleotide
yg

SEQ ID NO: 13247 - DNA, 2 bp, Artificial Sequence
  Description of Artificial Sequence: Synthetic oligonucleotide
yg

SEQ ID NO: 13248 - DNA, 2 bp, Artificial Sequence
  Description of Artificial Sequence: Synthetic oligonucleotide
yg

SEQ ID NO: 13249 - DNA, 2 bp, Artificial Sequence
  Description of Artificial Sequence: Synthetic oligonucleotide
yg

SEQ ID NO: 13250 - DNA, 2 bp, Artificial Sequence
  Description of Artificial Sequence: Synthetic oligonucleotide
yg

SEQ ID NO: 13251 - DNA, 2 bp, Artificial Sequence
  Description of Artificial Sequence: Synthetic oligonucleotide
yg

SEQ ID NO: 13252 - DNA, 2 bp, Artificial Sequence
  Description of Artificial Sequence: Synthetic oligonucleotide
yg

SEQ ID NO: 13253 - DNA, 2 bp, Artificial Sequence
  Description of Artificial Sequence: Synthetic oligonucleotide
yg

SEQ ID NO: 13254 - DNA, 2 bp, Artificial Sequence
  Description of Artificial Sequence: Synthetic oligonucleotide
yg

SEQ ID NO: 13255 - DNA, 2 bp, Artificial Sequence
  Description of Artificial Sequence: Synthetic oligonucleotide
yg

SEQ ID NO: 13256 - DNA, 18 bp, Artificial Sequence
  Description of Artificial Sequence: Synthetic oligonucleotide
ygygtttttttgatygyg

SEQ ID NO: 13257 - DNA, 18 bp, Artificial Sequence
  Description of Artificial Sequence: Synthetic oligonucleotide
ygtaggttagtgagtgyg

SEQ ID NO: 13258 - DNA, 2 bp, Artificial Sequence
  Description of Artificial Sequence: Synthetic oligonucleotide
yg

SEQ ID NO: 13259 - DNA, 2 bp, Artificial Sequence
  Description of Artificial Sequence: Synthetic oligonucleotide
yg

SEQ ID NO: 13260 - DNA, 2 bp, Artificial Sequence
  Description of Artificial Sequence: Synthetic oligonucleotide
yg

SEQ ID NO: 13261 - DNA, 2 bp, Artificial Sequence
  Description of Artificial Sequence: Synthetic oligonucleotide
yg

SEQ ID NO: 13262 - DNA, 2 bp, Artificial Sequence
  Description of Artificial Sequence: Synthetic oligonucleotide
yg

SEQ ID NO: 13263 - DNA, 2 bp, Artificial Sequence
  Description of Artificial Sequence: Synthetic oligonucleotide
yg

SEQ ID NO: 13264 - DNA, 2 bp, Artificial Sequence
  Description of Artificial Sequence: Synthetic oligonucleotide
yg

SEQ ID NO: 13265 - DNA, 2 bp, Artificial Sequence
  Description of Artificial Sequence: Synthetic oligonucleotide
yg

SEQ ID NO: 13266 - DNA, 2 bp, Artificial Sequence
  Description of Artificial Sequence: Synthetic oligonucleotide
yg

SEQ ID NO: 13267 - DNA, 2 bp, Artificial Sequence
  Description of Artificial Sequence: Synthetic oligonucleotide
yg

SEQ ID NO: 13268 - DNA, 87 bp, Artificial Sequence
  Description of Artificial Sequence: Synthetic oligonucleotide
ygagtygaagtagggygaggtattgttttatttgggaagygtaaggggttagagagtttttttttygagttaaataaatgggtgayg

SEQ ID NO: 13269 - DNA, 2 bp, Artificial Sequence
  Description of Artificial Sequence: Synthetic oligonucleotide
yg

SEQ ID NO: 13270 - DNA, 2 bp, Artificial Sequence
  Description of Artificial Sequence: Synthetic oligonucleotide
yg

SEQ ID NO: 13271 - DNA, 2 bp, Artificial Sequence
  Description of Artificial Sequence: Synthetic oligonucleotide
yg

SEQ ID NO: 13272 - DNA, 2 bp, Artificial Sequence
  Description of Artificial Sequence: Synthetic oligonucleotide
yg

SEQ ID NO: 13273 - DNA, 2 bp, Artificial Sequence
  Description of Artificial Sequence: Synthetic oligonucleotide
yg

SEQ ID NO: 13274 - DNA, 2 bp, Artificial Sequence
  Description of Artificial Sequence: Synthetic oligonucleotide
yg

SEQ ID NO: 13275 - DNA, 2 bp, Artificial Sequence
  Description of Artificial Sequence: Synthetic oligonucleotide
yg

SEQ ID NO: 13276 - DNA, 2 bp, Artificial Sequence
  Description of Artificial Sequence: Synthetic oligonucleotide
yg

SEQ ID NO: 13277 - DNA, 2 bp, Artificial Sequence
  Description of Artificial Sequence: Synthetic oligonucleotide
yg

SEQ ID NO: 13278 - DNA, 2 bp, Artificial Sequence
  Description of Artificial Sequence: Synthetic oligonucleotide
yg

SEQ ID NO: 13279 - DNA, 11 bp, Artificial Sequence
  Description of Artificial Sequence: Synthetic oligonucleotide
yggagtttgyg

SEQ ID NO: 13280 - DNA, 2 bp, Artificial Sequence
  Description of Artificial Sequence: Synthetic oligonucleotide
yg

SEQ ID NO: 13281 - DNA, 2 bp, Artificial Sequence
  Description of Artificial Sequence: Synthetic oligonucleotide
yg

SEQ ID NO: 13282 - DNA, 2 bp, Artificial Sequence
  Description of Artificial Sequence: Synthetic oligonucleotide
yg

SEQ ID NO: 13283 - DNA, 2 bp, Artificial Sequence
  Description of Artificial Sequence: Synthetic oligonucleotide
yg

SEQ ID NO: 13284 - DNA, 2 bp, Artificial Sequence
  Description of Artificial Sequence: Synthetic oligonucleotide
yg

SEQ ID NO: 13285 - DNA, 2 bp, Artificial Sequence
  Description of Artificial Sequence: Synthetic oligonucleotide
yg

SEQ ID NO: 13286 - DNA, 2 bp, Artificial Sequence
  Description of Artificial Sequence: Synthetic oligonucleotide
yg

SEQ ID NO: 13287 - DNA, 2 bp, Artificial Sequence
  Description of Artificial Sequence: Synthetic oligonucleotide
yg

SEQ ID NO: 13288 - DNA, 2 bp, Artificial Sequence
  Description of Artificial Sequence: Synthetic oligonucleotide
yg

SEQ ID NO: 13289 - DNA, 2 bp, Artificial Sequence
  Description of Artificial Sequence: Synthetic oligonucleotide
yg

SEQ ID NO: 13290 - DNA, 2 bp, Artificial Sequence
  Description of Artificial Sequence: Synthetic oligonucleotide
yg

SEQ ID NO: 13291 - DNA, 2 bp, Artificial Sequence
  Description of Artificial Sequence: Synthetic oligonucleotide
yg

SEQ ID NO: 13292 - DNA, 2 bp, Artificial Sequence
  Description of Artificial Sequence: Synthetic oligonucleotide
yg

SEQ ID NO: 13293 - DNA, 2 bp, Artificial Sequence
  Description of Artificial Sequence: Synthetic oligonucleotide
yg

SEQ ID NO: 13294 - DNA, 2 bp, Artificial Sequence
  Description of Artificial Sequence: Synthetic oligonucleotide
yg

SEQ ID NO: 13295 - DNA, 2 bp, Artificial Sequence
  Description of Artificial Sequence: Synthetic oligonucleotide
yg

SEQ ID NO: 13296 - DNA, 2 bp, Artificial Sequence
  Description of Artificial Sequence: Synthetic oligonucleotide
yg

SEQ ID NO: 13297 - DNA, 2 bp, Artificial Sequence
  Description of Artificial Sequence: Synthetic oligonucleotide
yg

SEQ ID NO: 13298 - DNA, 2 bp, Artificial Sequence
  Description of Artificial Sequence: Synthetic oligonucleotide
yg

SEQ ID NO: 13299 - DNA, 167 bp, Artificial Sequence
  Description of Artificial Sequence: Synthetic polynucleotide
ygtatygtgggygagtygaagtagggygaggtattgttttatttgggaagygttaggggttagggagtttttttttygagttaaggaaaggggtgatygaygtatttagaaaatygggttatttttattygaatattgygttttttagatyggtttaaaaaatggyg

SEQ ID NO: 13300 - DNA, 2 bp, Artificial Sequence
  Description of Artificial Sequence: Synthetic oligonucleotide
yg

SEQ ID NO: 13301 - DNA, 2 bp, Artificial Sequence
  Description of Artificial Sequence: Synthetic oligonucleotide
yg

SEQ ID NO: 13302 - DNA, 2 bp, Artificial Sequence
  Description of Artificial Sequence: Synthetic oligonucleotide
yg

SEQ ID NO: 13303 - DNA, 185 bp, Artificial Sequence
  Description of Artificial Sequence: Synthetic polynucleotide
ygttgaatgtttaggattgygaggttttygtggaggttttgygttttgttaaaygttattgtaagygttgygttatygagtatattaattyggtttttttttgaagggatagagtttattyggygttgtatttatataaatttgaataaagtaaatttttttaaaagtagygtatgtaagtatyg

SEQ ID NO: 13304 - DNA, 17 bp, Artificial Sequence
  Description of Artificial Sequence: Synthetic oligonucleotide
ygagtygaagtagggyg

SEQ ID NO: 13305 - DNA, 135 bp, Artificial Sequence
  Description of Artificial Sequence: Synthetic polynucleotide
ygtgygygagtygaagtagggtaaggtaatgttttattygggaagygttaggggttagggagtttttttttttagttaaagaaaggggtgayggaygtatttggaaaatygggttatttttattygaatattgyg

SEQ ID NO: 13306 - DNA, 2 bp, Artificial Sequence
  Description of Artificial Sequence: Synthetic oligonucleotide
yg

SEQ ID NO: 13307 - DNA, 71 bp, Artificial Sequence
  Description of Artificial Sequence: Synthetic oligonucleotide
ygttygtttttggygttttttyggttttggtatttattttggtygygtttgaggagttttttagttygtyg

SEQ ID NO: 13308 - DNA, 54 bp, Artificial Sequence
  Description of Artificial Sequence: Synthetic oligonucleotide
ygygtatygtgygygagtygaagtagggygaggtattgttttatttgggaagyg

SEQ ID NO: 13309 - DNA, 5 bp, Artificial Sequence
  Description of Artificial Sequence: Synthetic oligonucleotide
yggyg

SEQ ID NO: 13310 - DNA, 29 bp, Artificial Sequence
  Description of Artificial Sequence: Synthetic oligonucleotide
ygtyggtttttaagttygtaggaaaagyg

SEQ ID NO: 13311 - DNA, 18 bp, Artificial Sequence
  Description of Artificial Sequence: Synthetic oligonucleotide
ygttttttagtgtttgyg

SEQ ID NO: 13312 - DNA, 2 bp, Artificial Sequence
  Description of Artificial Sequence: Synthetic oligonucleotide
yg

SEQ ID NO: 13313 - DNA, 5 bp, Artificial Sequence
  Description of Artificial Sequence: Synthetic oligonucleotide
ygayg

SEQ ID NO: 13314 - DNA, 24 bp, Artificial Sequence
  Description of Artificial Sequence: Synthetic oligonucleotide
ygaagygttttttgygtagattyg

SEQ ID NO: 13315 - DNA, 2 bp, Artificial Sequence
  Description of Artificial Sequence: Synthetic oligonucleotide
yg

SEQ ID NO: 13316 - DNA, 4 bp, Artificial Sequence
  Description of Artificial Sequence: Synthetic oligonucleotide
ygyg

SEQ ID NO: 13317 - DNA, 2 bp, Artificial Sequence
  Description of Artificial Sequence: Synthetic oligonucleotide
yg

SEQ ID NO: 13318 - DNA, 2 bp, Artificial Sequence
  Description of Artificial Sequence: Synthetic oligonucleotide
yg

SEQ ID NO: 13319 - DNA, 2 bp, Artificial Sequence
  Description of Artificial Sequence: Synthetic oligonucleotide
yg

SEQ ID NO: 13320 - DNA, 2 bp, Artificial Sequence
  Description of Artificial Sequence: Synthetic oligonucleotide
yg

SEQ ID NO: 13321 - DNA, 2 bp, Artificial Sequence
  Description of Artificial Sequence: Synthetic oligonucleotide
yg

SEQ ID NO: 13322 - DNA, 2 bp, Artificial Sequence
  Description of Artificial Sequence: Synthetic oligonucleotide
yg

SEQ ID NO: 13323 - DNA, 2 bp, Artificial Sequence
  Description of Artificial Sequence: Synthetic oligonucleotide
yg

SEQ ID NO: 13324 - DNA, 2 bp, Artificial Sequence
  Description of Artificial Sequence: Synthetic oligonucleotide
yg

SEQ ID NO: 13325 - DNA, 2 bp, Artificial Sequence
  Description of Artificial Sequence: Synthetic oligonucleotide
yg

SEQ ID NO: 13326 - DNA, 2 bp, Artificial Sequence
  Description of Artificial Sequence: Synthetic oligonucleotide
yg

SEQ ID NO: 13327 - DNA, 12 bp, Artificial Sequence
  Description of Artificial Sequence: Synthetic oligonucleotide
yggggtaggtyg

SEQ ID NO: 13328 - DNA, 2 bp, Artificial Sequence
  Description of Artificial Sequence: Synthetic oligonucleotide
yg

SEQ ID NO: 13329 - DNA, 2 bp, Artificial Sequence
  Description of Artificial Sequence: Synthetic oligonucleotide
yg

SEQ ID NO: 13330 - DNA, 2 bp, Artificial Sequence
  Description of Artificial Sequence: Synthetic oligonucleotide
yg

SEQ ID NO: 13331 - DNA, 2 bp, Artificial Sequence
  Description of Artificial Sequence: Synthetic oligonucleotide
yg

SEQ ID NO: 13332 - DNA, 2 bp, Artificial Sequence
  Description of Artificial Sequence: Synthetic oligonucleotide
yg

SEQ ID NO: 13333 - DNA, 2 bp, Artificial Sequence
  Description of Artificial Sequence: Synthetic oligonucleotide
yg

SEQ ID NO: 13334 - DNA, 2 bp, Artificial Sequence
  Description of Artificial Sequence: Synthetic oligonucleotide
yg

SEQ ID NO: 13335 - DNA, 2 bp, Artificial Sequence
  Description of Artificial Sequence: Synthetic oligonucleotide
yg

SEQ ID NO: 13336 - DNA, 2 bp, Artificial Sequence
  Description of Artificial Sequence: Synthetic oligonucleotide
yg

SEQ ID NO: 13337 - DNA, 2 bp, Artificial Sequence
  Description of Artificial Sequence: Synthetic oligonucleotide
yg

SEQ ID NO: 13338 - DNA, 2 bp, Artificial Sequence
  Description of Artificial Sequence: Synthetic oligonucleotide
yg

SEQ ID NO: 13339 - DNA, 2 bp, Artificial Sequence
  Description of Artificial Sequence: Synthetic oligonucleotide
yg

SEQ ID NO: 13340 - DNA, 2 bp, Artificial Sequence
  Description of Artificial Sequence: Synthetic oligonucleotide
yg

SEQ ID NO: 13341 - DNA, 2 bp, Artificial Sequence
  Description of Artificial Sequence: Synthetic oligonucleotide
yg

SEQ ID NO: 13342 - DNA, 2 bp, Artificial Sequence
  Description of Artificial Sequence: Synthetic oligonucleotide
yg

SEQ ID NO: 13343 - DNA, 2 bp, Artificial Sequence
  Description of Artificial Sequence: Synthetic oligonucleotide
yg

SEQ ID NO: 13344 - DNA, 2 bp, Artificial Sequence
  Description of Artificial Sequence: Synthetic oligonucleotide
yg

SEQ ID NO: 13345 - DNA, 2 bp, Artificial Sequence
  Description of Artificial Sequence: Synthetic oligonucleotide
yg

SEQ ID NO: 13346 - DNA, 2 bp, Artificial Sequence
  Description of Artificial Sequence: Synthetic oligonucleotide
yg

SEQ ID NO: 13347 - DNA, 2 bp, Artificial Sequence
  Description of Artificial Sequence: Synthetic oligonucleotide
yg

SEQ ID NO: 13348 - DNA, 2 bp, Artificial Sequence
  Description of Artificial Sequence: Synthetic oligonucleotide
yg

SEQ ID NO: 13349 - DNA, 80 bp, Artificial Sequence
  Description of Artificial Sequence: Synthetic oligonucleotide
ygtattygygttaggagtatggatttatttagggagtgtttgggyggagaagtagtttttgttttaggtttttygttgyg

SEQ ID NO: 13350 - DNA, 2 bp, Artificial Sequence
  Description of Artificial Sequence: Synthetic oligonucleotide
yg

SEQ ID NO: 13351 - DNA, 2 bp, Artificial Sequence
  Description of Artificial Sequence: Synthetic oligonucleotide
yg

SEQ ID NO: 13352 - DNA, 2 bp, Artificial Sequence
  Description of Artificial Sequence: Synthetic oligonucleotide
yg

SEQ ID NO: 13353 - DNA, 2 bp, Artificial Sequence
  Description of Artificial Sequence: Synthetic oligonucleotide
yg

SEQ ID NO: 13354 - DNA, 2 bp, Artificial Sequence
  Description of Artificial Sequence: Synthetic oligonucleotide
yg

SEQ ID NO: 13355 - DNA, 2 bp, Artificial Sequence
  Description of Artificial Sequence: Synthetic oligonucleotide
yg

SEQ ID NO: 13356 - DNA, 2 bp, Artificial Sequence
  Description of Artificial Sequence: Synthetic oligonucleotide
yg

SEQ ID NO: 13357 - DNA, 2 bp, Artificial Sequence
  Description of Artificial Sequence: Synthetic oligonucleotide
yg

SEQ ID NO: 13358 - DNA, 2 bp, Artificial Sequence
  Description of Artificial Sequence: Synthetic oligonucleotide
yg

SEQ ID NO: 13359 - DNA, 2 bp, Artificial Sequence
  Description of Artificial Sequence: Synthetic oligonucleotide
yg

SEQ ID NO: 13360 - DNA, 4 bp, Artificial Sequence
  Description of Artificial Sequence: Synthetic oligonucleotide
ygyg

SEQ ID NO: 13361 - DNA, 2 bp, Artificial Sequence
  Description of Artificial Sequence: Synthetic oligonucleotide
yg

SEQ ID NO: 13362 - DNA, 2 bp, Artificial Sequence
  Description of Artificial Sequence: Synthetic oligonucleotide
yg

SEQ ID NO: 13363 - DNA, 2 bp, Artificial Sequence
  Description of Artificial Sequence: Synthetic oligonucleotide
yg

SEQ ID NO: 13364 - DNA, 2 bp, Artificial Sequence
  Description of Artificial Sequence: Synthetic oligonucleotide
yg

SEQ ID NO: 13365 - DNA, 2 bp, Artificial Sequence
  Description of Artificial Sequence: Synthetic oligonucleotide
yg

SEQ ID NO: 13366 - DNA, 2 bp, Artificial Sequence
  Description of Artificial Sequence: Synthetic oligonucleotide
yg

SEQ ID NO: 13367 - DNA, 2 bp, Artificial Sequence
  Description of Artificial Sequence: Synthetic oligonucleotide
yg

SEQ ID NO: 13368 - DNA, 2 bp, Artificial Sequence
  Description of Artificial Sequence: Synthetic oligonucleotide
yg

SEQ ID NO: 13369 - DNA, 2 bp, Artificial Sequence
  Description of Artificial Sequence: Synthetic oligonucleotide
yg

SEQ ID NO: 13370 - DNA, 2 bp, Artificial Sequence
  Description of Artificial Sequence: Synthetic oligonucleotide
yg

SEQ ID NO: 13371 - DNA, 3039 bp, Artificial Sequence
  Description of Artificial Sequence: Synthetic polynucleotide
ygttagattyggggttgtygtggagtttttgatttgaatttagggtgygtgtygygtttayggggggatattttaaagyggtaagaatgttttttgggaagggaataggaygttaggtttgaaaggggattttgaagtagtttaggaaaaaattttttayggattayggtgttttttyggtagtttttttgttaggttygagggggttgttgtgttttaggtttgtatttagggttttayggggggtattttaaagyggtaagtaggtttttaggggaaggggatagtaygttaggtttggagggggaygttgaggtagtttygggaataaagaggggatgttggggttttgttayggataatattgttttttygatagtatttgtggtgggtttgggagygttatggagtttttggtttgtatttaaggtgygtgtttygttttyggggggtattataaagyggtaagaaggttatygggggaagggtatgggaygttagggttgaaagggatagttgaggtagttyggggaaaaaygtggtaggttggggtygttttatggaygatagtgtttttttagtagtttttgygttaggttyggggtggtygtggagtttttggtttgtatygagggtgygggtygtatttatgggggtattttaaagtggtaagaaggtygtygggygaaygttatagaaggttaggttttaatggggatgttgaggtagtatagagagaaaagyggttagtygggttttttttayggatgatagtgtttttttggtagtttttgygttgggttyggggggatygtggagtttttattttgtatttagggtgygtgtttygtttatgggaggtattttaaagyggtaagtaggtttttgggggaaggggatagtattttagatttgaagggggattttgaggtagttygtggaaaaaaayggygaygttgagttttttttataaaygatagtgtttttttggtagttttttygttgggttagggtggttttggagttygtggtttgtatttagggtgygtgtttygtttaagggggtattttaaagyggtaagtagattttygggggaagggagagtaygttaggtttgaaggggaggttgaggyggtttyggggtaaaagtggtgaagttggggtttttttayggatgatatygtttttttggtagtttttgtagtgggtttagaggtgtygtggagtttttggtttgtttttaggttgtgtgtttygtttaygagtggtattataaagtagtaagaaggtttttaggggaagggtataggattttagggttgaaaggtagagttgaggtagatyggtgttattttaaggataatagtgttttgttyggtagtttttgtatygggtttggggtggttgtggagtttttggtttgtattyggggtgygtgtygtgtttaygatgggtatygtaatgyggtaagaagttttygagtggaagggaataggaygtygagtttgaaaggggaygttgaggtagttyggggaaaaaatttttattgagaatagtgttttttyggtagtttttgagtgggatttaggtggayggtggagtttttggtttggatttagggtgtttgttttgtttayggggtgtaygtgaaagtggtaatagggttttygggggaaggggataatatgttaggtttgaagagggaygttgggttagttagaggaaaatagyggttaggttgtggtygttttatagattatagtgttttttyggtagtttttgagtttggtttaggygggggggtttggagtttttgttttgtaatagagtgygtgtttygtttaagtgtgtaygygaaagttgtaagaagggtttygggggaagggaataggatgttaggtttgaaaggggattttgaggtagtttagggaaaaattttttayggaggatagtgatttttygatattttttgygtttggttttgggggttttggagtttttggtttatatttagggtgygtgtttygtttaygggtggtattttaaagtagtaagaaagtttyggggggggaagaataggatgttagatttgaaaggggaygttgaggtagtttaggaaaaaaaggggygaggttggggtttttttayggatgatagtgttttttttatagtttttatgttagtttygggagggtygyggagtttttgttttgtatataatgtgygtgtttygtttayggggggtattttaaagtggtaagaagtttttygygggaaggtaataggaygttaggtttgaatggggaygtttaggtagtttggagaaaaaagtagygaggttggggtgattttaygaatgatagtgttttatyggtagtttttttgtygggtatgygggggttgttgattttttggtttgtatttagggtgagtgttttgtttayggygggtattataaagtagtaagaaggttttygggggaaagggatagtaygttagttttgaagggggaagttgaggtagtttyggggaaaaaaagyggggatgttggggtttttttayggaygatattgtttttttagtagtttttgtagtgggttygggagygttttggagtttttgttttgtatttygggtgygtgttttatttayggggagtattataaagyggtaagaaggttattgggggaagggtataggaygttagggttgaaggggatagtggagatagtttaaggaaaaaagtggygggatggtgtygttttaaggatggttatttttgygtygggttagggatggtygyggagtttttggtttgtatttaggttgtgtgtttygtttatagggggtattttaaagtagtaygaaggtttttaggggaagggaagaggaygttaggtttggaaggtgaygttgaggtagtagggggtaaaaagtggygggtygggtttttttayggatgatagtgttttttyggaagtygttgygtagggttyggygtgtttgtggagtttttggtttgtatttagaatygtgyg

SEQ ID NO: 13372 - DNA, 2 bp, Artificial Sequence
  Description of Artificial Sequence: Synthetic oligonucleotide
yg

SEQ ID NO: 13373 - DNA, 2 bp, Artificial Sequence
  Description of Artificial Sequence: Synthetic oligonucleotide
yg

SEQ ID NO: 13374 - DNA, 2 bp, Artificial Sequence
  Description of Artificial Sequence: Synthetic oligonucleotide
yg

SEQ ID NO: 13375 - DNA, 2 bp, Artificial Sequence
  Description of Artificial Sequence: Synthetic oligonucleotide
yg

SEQ ID NO: 13376 - DNA, 2 bp, Artificial Sequence
  Description of Artificial Sequence: Synthetic oligonucleotide
yg

SEQ ID NO: 13377 - DNA, 2 bp, Artificial Sequence
  Description of Artificial Sequence: Synthetic oligonucleotide
yg

SEQ ID NO: 13378 - DNA, 2 bp, Artificial Sequence
  Description of Artificial Sequence: Synthetic oligonucleotide
yg

SEQ ID NO: 13379 - DNA, 2 bp, Artificial Sequence
  Description of Artificial Sequence: Synthetic oligonucleotide
yg

SEQ ID NO: 13380 - DNA, 2 bp, Artificial Sequence
  Description of Artificial Sequence: Synthetic oligonucleotide
yg

SEQ ID NO: 13381 - DNA, 2 bp, Artificial Sequence
  Description of Artificial Sequence: Synthetic oligonucleotide
yg

SEQ ID NO: 13382 - DNA, 2 bp, Artificial Sequence
  Description of Artificial Sequence: Synthetic oligonucleotide
tg

SEQ ID NO: 13383 - DNA, 9 bp, Artificial Sequence
  Description of Artificial Sequence: Synthetic oligonucleotide
tgaatggtg

SEQ ID NO: 13384 - DNA, 2 bp, Artificial Sequence
  Description of Artificial Sequence: Synthetic oligonucleotide
tg

SEQ ID NO: 13385 - DNA, 2 bp, Artificial Sequence
  Description of Artificial Sequence: Synthetic oligonucleotide
tg

SEQ ID NO: 13386 - DNA, 2 bp, Artificial Sequence
  Description of Artificial Sequence: Synthetic oligonucleotide
tg

SEQ ID NO: 13387 - DNA, 2 bp, Artificial Sequence
  Description of Artificial Sequence: Synthetic oligonucleotide
tg

SEQ ID NO: 13388 - DNA, 2 bp, Artificial Sequence
  Description of Artificial Sequence: Synthetic oligonucleotide
tg

SEQ ID NO: 13389 - DNA, 2 bp, Artificial Sequence
  Description of Artificial Sequence: Synthetic oligonucleotide
tg

SEQ ID NO: 13390 - DNA, 2 bp, Artificial Sequence
  Description of Artificial Sequence: Synthetic oligonucleotide
tg

SEQ ID NO: 13391 - DNA, 2 bp, Artificial Sequence
  Description of Artificial Sequence: Synthetic oligonucleotide
tg

SEQ ID NO: 13392 - DNA, 2 bp, Artificial Sequence
  Description of Artificial Sequence: Synthetic oligonucleotide
tg

SEQ ID NO: 13393 - DNA, 2 bp, Artificial Sequence
  Description of Artificial Sequence: Synthetic oligonucleotide
tg

SEQ ID NO: 13394 - DNA, 36 bp, Artificial Sequence
  Description of Artificial Sequence: Synthetic oligonucleotide
tggtttatgtagggtgtgtgtatttattgatttgtg

SEQ ID NO: 13395 - DNA, 2 bp, Artificial Sequence
  Description of Artificial Sequence: Synthetic oligonucleotide
tg

SEQ ID NO: 13396 - DNA, 2 bp, Artificial Sequence
  Description of Artificial Sequence: Synthetic oligonucleotide
tg

SEQ ID NO: 13397 - DNA, 2 bp, Artificial Sequence
  Description of Artificial Sequence: Synthetic oligonucleotide
tg

SEQ ID NO: 13398 - DNA, 2 bp, Artificial Sequence
  Description of Artificial Sequence: Synthetic oligonucleotide
tg

SEQ ID NO: 13399 - DNA, 2 bp, Artificial Sequence
  Description of Artificial Sequence: Synthetic oligonucleotide
tg

SEQ ID NO: 13400 - DNA, 2 bp, Artificial Sequence
  Description of Artificial Sequence: Synthetic oligonucleotide
tg

SEQ ID NO: 13401 - DNA, 2 bp, Artificial Sequence
  Description of Artificial Sequence: Synthetic oligonucleotide
tg

SEQ ID NO: 13402 - DNA, 2 bp, Artificial Sequence
  Description of Artificial Sequence: Synthetic oligonucleotide
tg

SEQ ID NO: 13403 - DNA, 2 bp, Artificial Sequence
  Description of Artificial Sequence: Synthetic oligonucleotide
tg

SEQ ID NO: 13404 - DNA, 2 bp, Artificial Sequence
  Description of Artificial Sequence: Synthetic oligonucleotide
tg

SEQ ID NO: 13405 - DNA, 8 bp, Artificial Sequence
  Description of Artificial Sequence: Synthetic oligonucleotide
tgatggtg

SEQ ID NO: 13406 - DNA, 2 bp, Artificial Sequence
  Description of Artificial Sequence: Synthetic oligonucleotide
tg

SEQ ID NO: 13407 - DNA, 2 bp, Artificial Sequence
  Description of Artificial Sequence: Synthetic oligonucleotide
tg

SEQ ID NO: 13408 - DNA, 2 bp, Artificial Sequence
  Description of Artificial Sequence: Synthetic oligonucleotide
tg

SEQ ID NO: 13409 - DNA, 2 bp, Artificial Sequence
  Description of Artificial Sequence: Synthetic oligonucleotide
tg

SEQ ID NO: 13410 - DNA, 2 bp, Artificial Sequence
  Description of Artificial Sequence: Synthetic oligonucleotide
tg

SEQ ID NO: 13411 - DNA, 2 bp, Artificial Sequence
  Description of Artificial Sequence: Synthetic oligonucleotide
tg

SEQ ID NO: 13412 - DNA, 2 bp, Artificial Sequence
  Description of Artificial Sequence: Synthetic oligonucleotide
tg

SEQ ID NO: 13413 - DNA, 2 bp, Artificial Sequence
  Description of Artificial Sequence: Synthetic oligonucleotide
tg

SEQ ID NO: 13414 - DNA, 2 bp, Artificial Sequence
  Description of Artificial Sequence: Synthetic oligonucleotide
tg

SEQ ID NO: 13415 - DNA, 2 bp, Artificial Sequence
  Description of Artificial Sequence: Synthetic oligonucleotide
tg

SEQ ID NO: 13416 - DNA, 181 bp, Artificial Sequence
  Description of Artificial Sequence: Synthetic polynucleotide
tggagattgtagtgagttgagattgtgttattgtattttaatggtattttagtttgatgatagagtgagattttgttttaaaaataataataaataaataaataaataaataaaaattagttgggtgtggtggtgtgtgtttgtagttttagttatttgggagattgaggtaggagaattg

SEQ ID NO: 13417 - DNA, 2 bp, Artificial Sequence
  Description of Artificial Sequence: Synthetic oligonucleotide
tg

SEQ ID NO: 13418 - DNA, 2 bp, Artificial Sequence
  Description of Artificial Sequence: Synthetic oligonucleotide
tg

SEQ ID NO: 13419 - DNA, 2 bp, Artificial Sequence
  Description of Artificial Sequence: Synthetic oligonucleotide
tg

SEQ ID NO: 13420 - DNA, 2 bp, Artificial Sequence
  Description of Artificial Sequence: Synthetic oligonucleotide
tg

SEQ ID NO: 13421 - DNA, 2 bp, Artificial Sequence
  Description of Artificial Sequence: Synthetic oligonucleotide
tg

SEQ ID NO: 13422 - DNA, 2 bp, Artificial Sequence
  Description of Artificial Sequence: Synthetic oligonucleotide
tg

SEQ ID NO: 13423 - DNA, 2 bp, Artificial Sequence
  Description of Artificial Sequence: Synthetic oligonucleotide
tg

SEQ ID NO: 13424 - DNA, 2 bp, Artificial Sequence
  Description of Artificial Sequence: Synthetic oligonucleotide
tg

SEQ ID NO: 13425 - DNA, 2 bp, Artificial Sequence
  Description of Artificial Sequence: Synthetic oligonucleotide
tg

SEQ ID NO: 13426 - DNA, 2 bp, Artificial Sequence
  Description of Artificial Sequence: Synthetic oligonucleotide
tg

SEQ ID NO: 13427 - DNA, 369 bp, Artificial Sequence
  Description of Artificial Sequence: Synthetic polynucleotide
tgtgtttgaggagttttttagtttgttgttgtattgtgggagtttttttttgggttggataaggttggagttggtttttttagtttgtgggtaggtgtggagagagaggtgtgggtgggaattgtggttgtaggttgtgtttgtgggttagtttgagttttgggtgggtgtgggtttggtaagttttgtatttggagtggttagttggtttgggtagtgaggagtttagtatttgggttagtagttgttgtgtttgattttttgttgggttttagttgtttttttgttgggtagggtttgggatttgtagttttttatgtttgagtttttatttttgttgtgtgtttttgtgtagtttaagtttttttg

SEQ ID NO: 13428 - DNA, 2 bp, Artificial Sequence
  Description of Artificial Sequence: Synthetic oligonucleotide
tg

SEQ ID NO: 13429 - DNA, 2 bp, Artificial Sequence
  Description of Artificial Sequence: Synthetic oligonucleotide
tg

SEQ ID NO: 13430 - DNA, 2 bp, Artificial Sequence
  Description of Artificial Sequence: Synthetic oligonucleotide
tg

SEQ ID NO: 13431 - DNA, 2 bp, Artificial Sequence
  Description of Artificial Sequence: Synthetic oligonucleotide
tg

SEQ ID NO: 13432 - DNA, 2 bp, Artificial Sequence
  Description of Artificial Sequence: Synthetic oligonucleotide
tg

SEQ ID NO: 13433 - DNA, 2 bp, Artificial Sequence
  Description of Artificial Sequence: Synthetic oligonucleotide
tg

SEQ ID NO: 13434 - DNA, 2 bp, Artificial Sequence
  Description of Artificial Sequence: Synthetic oligonucleotide
tg

SEQ ID NO: 13435 - DNA, 2 bp, Artificial Sequence
  Description of Artificial Sequence: Synthetic oligonucleotide
tg

SEQ ID NO: 13436 - DNA, 2 bp, Artificial Sequence
  Description of Artificial Sequence: Synthetic oligonucleotide
tg

SEQ ID NO: 13437 - DNA, 2 bp, Artificial Sequence
  Description of Artificial Sequence: Synthetic oligonucleotide
tg

SEQ ID NO: 13438 - DNA, 2 bp, Artificial Sequence
  Description of Artificial Sequence: Synthetic oligonucleotide
tg

SEQ ID NO: 13439 - DNA, 2 bp, Artificial Sequence
  Description of Artificial Sequence: Synthetic oligonucleotide
tg

SEQ ID NO: 13440 - DNA, 2 bp, Artificial Sequence
  Description of Artificial Sequence: Synthetic oligonucleotide
tg

SEQ ID NO: 13441 - DNA, 2 bp, Artificial Sequence
  Description of Artificial Sequence: Synthetic oligonucleotide
tg

SEQ ID NO: 13442 - DNA, 2 bp, Artificial Sequence
  Description of Artificial Sequence: Synthetic oligonucleotide
tg

SEQ ID NO: 13443 - DNA, 2 bp, Artificial Sequence
  Description of Artificial Sequence: Synthetic oligonucleotide
tg

SEQ ID NO: 13444 - DNA, 2 bp, Artificial Sequence
  Description of Artificial Sequence: Synthetic oligonucleotide
tg

SEQ ID NO: 13445 - DNA, 2 bp, Artificial Sequence
  Description of Artificial Sequence: Synthetic oligonucleotide
tg

SEQ ID NO: 13446 - DNA, 2 bp, Artificial Sequence
  Description of Artificial Sequence: Synthetic oligonucleotide
tg

SEQ ID NO: 13447 - DNA, 2 bp, Artificial Sequence
  Description of Artificial Sequence: Synthetic oligonucleotide
tg

SEQ ID NO: 13448 - DNA, 2 bp, Artificial Sequence
  Description of Artificial Sequence: Synthetic oligonucleotide
tg

SEQ ID NO: 13449 - DNA, 35 bp, Artificial Sequence
  Description of Artificial Sequence: Synthetic oligonucleotide
tgtttgtattattattttgattttatttattattg

SEQ ID NO: 13450 - DNA, 2 bp, Artificial Sequence
  Description of Artificial Sequence: Synthetic oligonucleotide
tg

SEQ ID NO: 13451 - DNA, 2 bp, Artificial Sequence
  Description of Artificial Sequence: Synthetic oligonucleotide
tg

SEQ ID NO: 13452 - DNA, 2 bp, Artificial Sequence
  Description of Artificial Sequence: Synthetic oligonucleotide
tg

SEQ ID NO: 13453 - DNA, 2 bp, Artificial Sequence
  Description of Artificial Sequence: Synthetic oligonucleotide
tg

SEQ ID NO: 13454 - DNA, 2 bp, Artificial Sequence
  Description of Artificial Sequence: Synthetic oligonucleotide
tg

SEQ ID NO: 13455 - DNA, 2 bp, Artificial Sequence
  Description of Artificial Sequence: Synthetic oligonucleotide
tg

SEQ ID NO: 13456 - DNA, 2 bp, Artificial Sequence
  Description of Artificial Sequence: Synthetic oligonucleotide
tg

SEQ ID NO: 13457 - DNA, 2 bp, Artificial Sequence
  Description of Artificial Sequence: Synthetic oligonucleotide
tg

SEQ ID NO: 13458 - DNA, 2 bp, Artificial Sequence
  Description of Artificial Sequence: Synthetic oligonucleotide
tg

SEQ ID NO: 13459 - DNA, 2 bp, Artificial Sequence
  Description of Artificial Sequence: Synthetic oligonucleotide
tg

SEQ ID NO: 13460 - DNA, 487 bp, Artificial Sequence
  Description of Artificial Sequence: Synthetic polynucleotide
tgtttagggtgggaatttagtgtatgggtgaggattttaaaaagtaaggggtaggatgagttaataaggttttgagtaggaaaattatgtgataggaagtgtatatattgttttatagtagaaagattggggatgggattagtttttaagtgattttaaatttaaaaggaagtaatttttagatttttatgggtgttttaatttgttttgggtgaaggaagataggtaagaatttttaggtttgtgaggattttatgttttagggatagaagtgttagggatttgggaagtgtagatttaatataaggtagagtaaaatttatgtgttttggtaggatttttattttatgtgatttatttttgggtttgttgtgtaggatagaagttagttttgggtggggtttttgaatatggtggtggggtttgggtgggatagaggtggggtgtgaggtggagagattttgttttttagaataggtaaagggtg

SEQ ID NO: 13461 - DNA, 2 bp, Artificial Sequence
  Description of Artificial Sequence: Synthetic oligonucleotide
tg

SEQ ID NO: 13462 - DNA, 2 bp, Artificial Sequence
  Description of Artificial Sequence: Synthetic oligonucleotide
tg

SEQ ID NO: 13463 - DNA, 2 bp, Artificial Sequence
  Description of Artificial Sequence: Synthetic oligonucleotide
tg

SEQ ID NO: 13464 - DNA, 2 bp, Artificial Sequence
  Description of Artificial Sequence: Synthetic oligonucleotide
tg

SEQ ID NO: 13465 - DNA, 2 bp, Artificial Sequence
  Description of Artificial Sequence: Synthetic oligonucleotide
tg

SEQ ID NO: 13466 - DNA, 2 bp, Artificial Sequence
  Description of Artificial Sequence: Synthetic oligonucleotide
tg

SEQ ID NO: 13467 - DNA, 2 bp, Artificial Sequence
  Description of Artificial Sequence: Synthetic oligonucleotide
tg

SEQ ID NO: 13468 - DNA, 2 bp, Artificial Sequence
  Description of Artificial Sequence: Synthetic oligonucleotide
tg

SEQ ID NO: 13469 - DNA, 2 bp, Artificial Sequence
  Description of Artificial Sequence: Synthetic oligonucleotide
tg

SEQ ID NO: 13470 - DNA, 2 bp, Artificial Sequence
  Description of Artificial Sequence: Synthetic oligonucleotide
tg

SEQ ID NO: 13471 - DNA, 28 bp, Artificial Sequence
  Description of Artificial Sequence: Synthetic oligonucleotide
tgttttgattttttgattttgtgatttg

SEQ ID NO: 13472 - DNA, 2 bp, Artificial Sequence
  Description of Artificial Sequence: Synthetic oligonucleotide
tg

SEQ ID NO: 13473 - DNA, 2 bp, Artificial Sequence
  Description of Artificial Sequence: Synthetic oligonucleotide
tg

SEQ ID NO: 13474 - DNA, 2 bp, Artificial Sequence
  Description of Artificial Sequence: Synthetic oligonucleotide
tg

SEQ ID NO: 13475 - DNA, 2 bp, Artificial Sequence
  Description of Artificial Sequence: Synthetic oligonucleotide
tg

SEQ ID NO: 13476 - DNA, 2 bp, Artificial Sequence
  Description of Artificial Sequence: Synthetic oligonucleotide
tg

SEQ ID NO: 13477 - DNA, 2 bp, Artificial Sequence
  Description of Artificial Sequence: Synthetic oligonucleotide
tg

SEQ ID NO: 13478 - DNA, 2 bp, Artificial Sequence
  Description of Artificial Sequence: Synthetic oligonucleotide
tg

SEQ ID NO: 13479 - DNA, 2 bp, Artificial Sequence
  Description of Artificial Sequence: Synthetic oligonucleotide
tg

SEQ ID NO: 13480 - DNA, 2 bp, Artificial Sequence
  Description of Artificial Sequence: Synthetic oligonucleotide
tg

SEQ ID NO: 13481 - DNA, 2 bp, Artificial Sequence
  Description of Artificial Sequence: Synthetic oligonucleotide
tg

SEQ ID NO: 13482 - DNA, 2 bp, Artificial Sequence
  Description of Artificial Sequence: Synthetic oligonucleotide
tg

SEQ ID NO: 13483 - DNA, 2 bp, Artificial Sequence
  Description of Artificial Sequence: Synthetic oligonucleotide
tg

SEQ ID NO: 13484 - DNA, 2 bp, Artificial Sequence
  Description of Artificial Sequence: Synthetic oligonucleotide
tg

SEQ ID NO: 13485 - DNA, 2 bp, Artificial Sequence
  Description of Artificial Sequence: Synthetic oligonucleotide
tg

SEQ ID NO: 13486 - DNA, 2 bp, Artificial Sequence
  Description of Artificial Sequence: Synthetic oligonucleotide
tg

SEQ ID NO: 13487 - DNA, 2 bp, Artificial Sequence
  Description of Artificial Sequence: Synthetic oligonucleotide
tg

SEQ ID NO: 13488 - DNA, 2 bp, Artificial Sequence
  Description of Artificial Sequence: Synthetic oligonucleotide
tg

SEQ ID NO: 13489 - DNA, 2 bp, Artificial Sequence
  Description of Artificial Sequence: Synthetic oligonucleotide
tg

SEQ ID NO: 13490 - DNA, 2 bp, Artificial Sequence
  Description of Artificial Sequence: Synthetic oligonucleotide
tg

SEQ ID NO: 13491 - DNA, 2 bp, Artificial Sequence
  Description of Artificial Sequence: Synthetic oligonucleotide
tg

SEQ ID NO: 13492 - DNA, 2 bp, Artificial Sequence
  Description of Artificial Sequence: Synthetic oligonucleotide
tg

SEQ ID NO: 13493 - DNA, 18 bp, Artificial Sequence
  Description of Artificial Sequence: Synthetic oligonucleotide
tgtgtttttttgattgtg

SEQ ID NO: 13494 - DNA, 18 bp, Artificial Sequence
  Description of Artificial Sequence: Synthetic oligonucleotide
tgtaggttagtgagtgtg

SEQ ID NO: 13495 - DNA, 2 bp, Artificial Sequence
  Description of Artificial Sequence: Synthetic oligonucleotide
tg

SEQ ID NO: 13496 - DNA, 2 bp, Artificial Sequence
  Description of Artificial Sequence: Synthetic oligonucleotide
tg

SEQ ID NO: 13497 - DNA, 2 bp, Artificial Sequence
  Description of Artificial Sequence: Synthetic oligonucleotide
tg

SEQ ID NO: 13498 - DNA, 2 bp, Artificial Sequence
  Description of Artificial Sequence: Synthetic oligonucleotide
tg

SEQ ID NO: 13499 - DNA, 2 bp, Artificial Sequence
  Description of Artificial Sequence: Synthetic oligonucleotide
tg

SEQ ID NO: 13500 - DNA, 2 bp, Artificial Sequence
  Description of Artificial Sequence: Synthetic oligonucleotide
tg

SEQ ID NO: 13501 - DNA, 2 bp, Artificial Sequence
  Description of Artificial Sequence: Synthetic oligonucleotide
tg

SEQ ID NO: 13502 - DNA, 2 bp, Artificial Sequence
  Description of Artificial Sequence: Synthetic oligonucleotide
tg

SEQ ID NO: 13503 - DNA, 2 bp, Artificial Sequence
  Description of Artificial Sequence: Synthetic oligonucleotide
tg

SEQ ID NO: 13504 - DNA, 2 bp, Artificial Sequence
  Description of Artificial Sequence: Synthetic oligonucleotide
tg

SEQ ID NO: 13505 - DNA, 87 bp, Artificial Sequence
  Description of Artificial Sequence: Synthetic oligonucleotide
tgagttgaagtagggtgaggtattgttttatttgggaagtgtaaggggttagagagttttttttttgagttaaataaatgggtgatg

SEQ ID NO: 13506 - DNA, 2 bp, Artificial Sequence
  Description of Artificial Sequence: Synthetic oligonucleotide
tg

SEQ ID NO: 13507 - DNA, 2 bp, Artificial Sequence
  Description of Artificial Sequence: Synthetic oligonucleotide
tg

SEQ ID NO: 13508 - DNA, 2 bp, Artificial Sequence
  Description of Artificial Sequence: Synthetic oligonucleotide
tg

SEQ ID NO: 13509 - DNA, 2 bp, Artificial Sequence
  Description of Artificial Sequence: Synthetic oligonucleotide
tg

SEQ ID NO: 13510 - DNA, 2 bp, Artificial Sequence
  Description of Artificial Sequence: Synthetic oligonucleotide
tg

SEQ ID NO: 13511 - DNA, 2 bp, Artificial Sequence
  Description of Artificial Sequence: Synthetic oligonucleotide
tg

SEQ ID NO: 13512 - DNA, 2 bp, Artificial Sequence
  Description of Artificial Sequence: Synthetic oligonucleotide
tg

SEQ ID NO: 13513 - DNA, 2 bp, Artificial Sequence
  Description of Artificial Sequence: Synthetic oligonucleotide
tg

SEQ ID NO: 13514 - DNA, 2 bp, Artificial Sequence
  Description of Artificial Sequence: Synthetic oligonucleotide
tg

SEQ ID NO: 13515 - DNA, 2 bp, Artificial Sequence
  Description of Artificial Sequence: Synthetic oligonucleotide
tg

SEQ ID NO: 13516 - DNA, 11 bp, Artificial Sequence
  Description of Artificial Sequence: Synthetic oligonucleotide
tggagtttgtg

SEQ ID NO: 13517 - DNA, 2 bp, Artificial Sequence
  Description of Artificial Sequence: Synthetic oligonucleotide
tg

SEQ ID NO: 13518 - DNA, 2 bp, Artificial Sequence
  Description of Artificial Sequence: Synthetic oligonucleotide
tg

SEQ ID NO: 13519 - DNA, 2 bp, Artificial Sequence
  Description of Artificial Sequence: Synthetic oligonucleotide
tg

SEQ ID NO: 13520 - DNA, 2 bp, Artificial Sequence
  Description of Artificial Sequence: Synthetic oligonucleotide
tg

SEQ ID NO: 13521 - DNA, 2 bp, Artificial Sequence
  Description of Artificial Sequence: Synthetic oligonucleotide
tg

SEQ ID NO: 13522 - DNA, 2 bp, Artificial Sequence
  Description of Artificial Sequence: Synthetic oligonucleotide
tg

SEQ ID NO: 13523 - DNA, 2 bp, Artificial Sequence
  Description of Artificial Sequence: Synthetic oligonucleotide
tg

SEQ ID NO: 13524 - DNA, 2 bp, Artificial Sequence
  Description of Artificial Sequence: Synthetic oligonucleotide
tg

SEQ ID NO: 13525 - DNA, 2 bp, Artificial Sequence
  Description of Artificial Sequence: Synthetic oligonucleotide
tg

SEQ ID NO: 13526 - DNA, 2 bp, Artificial Sequence
  Description of Artificial Sequence: Synthetic oligonucleotide
tg

SEQ ID NO: 13527 - DNA, 2 bp, Artificial Sequence
  Description of Artificial Sequence: Synthetic oligonucleotide
tg

SEQ ID NO: 13528 - DNA, 2 bp, Artificial Sequence
  Description of Artificial Sequence: Synthetic oligonucleotide
tg

SEQ ID NO: 13529 - DNA, 2 bp, Artificial Sequence
  Description of Artificial Sequence: Synthetic oligonucleotide
tg

SEQ ID NO: 13530 - DNA, 2 bp, Artificial Sequence
  Description of Artificial Sequence: Synthetic oligonucleotide
tg

SEQ ID NO: 13531 - DNA, 2 bp, Artificial Sequence
  Description of Artificial Sequence: Synthetic oligonucleotide
tg

SEQ ID NO: 13532 - DNA, 2 bp, Artificial Sequence
  Description of Artificial Sequence: Synthetic oligonucleotide
tg

SEQ ID NO: 13533 - DNA, 2 bp, Artificial Sequence
  Description of Artificial Sequence: Synthetic oligonucleotide
tg

SEQ ID NO: 13534 - DNA, 2 bp, Artificial Sequence
  Description of Artificial Sequence: Synthetic oligonucleotide
tg

SEQ ID NO: 13535 - DNA, 2 bp, Artificial Sequence
  Description of Artificial Sequence: Synthetic oligonucleotide
tg

SEQ ID NO: 13536 - DNA, 167 bp, Artificial Sequence
  Description of Artificial Sequence: Synthetic polynucleotide
tgtattgtgggtgagttgaagtagggtgaggtattgttttatttgggaagtgttaggggttagggagttttttttttgagttaaggaaaggggtgattgatgtatttagaaaattgggttatttttatttgaatattgtgttttttagattggtttaaaaaatggtg

SEQ ID NO: 13537 - DNA, 2 bp, Artificial Sequence
  Description of Artificial Sequence: Synthetic oligonucleotide
tg

SEQ ID NO: 13538 - DNA, 2 bp, Artificial Sequence
  Description of Artificial Sequence: Synthetic oligonucleotide
tg

SEQ ID NO: 13539 - DNA, 2 bp, Artificial Sequence
  Description of Artificial Sequence: Synthetic oligonucleotide
tg

SEQ ID NO: 13540 - DNA, 185 bp, Artificial Sequence
  Description of Artificial Sequence: Synthetic polynucleotide
tgttgaatgtttaggattgtgaggtttttgtggaggttttgtgttttgttaaatgttattgtaagtgttgtgttattgagtatattaatttggtttttttttgaagggatagagtttatttggtgttgtatttatataaatttgaataaagtaaatttttttaaaagtagtgtatgtaagtattg

SEQ ID NO: 13541 - DNA, 17 bp, Artificial Sequence
  Description of Artificial Sequence: Synthetic oligonucleotide
tgagttgaagtagggtg

SEQ ID NO: 13542 - DNA, 135 bp, Artificial Sequence
  Description of Artificial Sequence: Synthetic polynucleotide
tgtgtgtgagttgaagtagggtaaggtaatgttttatttgggaagtgttaggggttagggagtttttttttttagttaaagaaaggggtgatggatgtatttggaaaattgggttatttttatttgaatattgtg

SEQ ID NO: 13543 - DNA, 2 bp, Artificial Sequence
  Description of Artificial Sequence: Synthetic oligonucleotide
tg

SEQ ID NO: 13544 - DNA, 71 bp, Artificial Sequence
  Description of Artificial Sequence: Synthetic oligonucleotide
tgtttgtttttggtgtttttttggttttggtatttattttggttgtgtttgaggagttttttagtttgttg

SEQ ID NO: 13545 - DNA, 54 bp, Artificial Sequence
  Description of Artificial Sequence: Synthetic oligonucleotide
tgtgtattgtgtgtgagttgaagtagggtgaggtattgttttatttgggaagtg

SEQ ID NO: 13546 - DNA, 5 bp, Artificial Sequence
  Description of Artificial Sequence: Synthetic oligonucleotide
tggtg

SEQ ID NO: 13547 - DNA, 29 bp, Artificial Sequence
  Description of Artificial Sequence: Synthetic oligonucleotide
tgttggtttttaagtttgtaggaaaagtg

SEQ ID NO: 13548 - DNA, 18 bp, Artificial Sequence
  Description of Artificial Sequence: Synthetic oligonucleotide
tgttttttagtgtttgtg

SEQ ID NO: 13549 - DNA, 2 bp, Artificial Sequence
  Description of Artificial Sequence: Synthetic oligonucleotide
tg

SEQ ID NO: 13550 - DNA, 5 bp, Artificial Sequence
  Description of Artificial Sequence: Synthetic oligonucleotide
tgatg

SEQ ID NO: 13551 - DNA, 24 bp, Artificial Sequence
  Description of Artificial Sequence: Synthetic oligonucleotide
tgaagtgttttttgtgtagatttg

SEQ ID NO: 13552 - DNA, 2 bp, Artificial Sequence
  Description of Artificial Sequence: Synthetic oligonucleotide
tg

SEQ ID NO: 13553 - DNA, 4 bp, Artificial Sequence
  Description of Artificial Sequence: Synthetic oligonucleotide
tgtg

SEQ ID NO: 13554 - DNA, 2 bp, Artificial Sequence
  Description of Artificial Sequence: Synthetic oligonucleotide
tg

SEQ ID NO: 13555 - DNA, 2 bp, Artificial Sequence
  Description of Artificial Sequence: Synthetic oligonucleotide
tg

SEQ ID NO: 13556 - DNA, 2 bp, Artificial Sequence
  Description of Artificial Sequence: Synthetic oligonucleotide
tg

SEQ ID NO: 13557 - DNA, 2 bp, Artificial Sequence
  Description of Artificial Sequence: Synthetic oligonucleotide
tg

SEQ ID NO: 13558 - DNA, 2 bp, Artificial Sequence
  Description of Artificial Sequence: Synthetic oligonucleotide
tg

SEQ ID NO: 13559 - DNA, 2 bp, Artificial Sequence
  Description of Artificial Sequence: Synthetic oligonucleotide
tg

SEQ ID NO: 13560 - DNA, 2 bp, Artificial Sequence
  Description of Artificial Sequence: Synthetic oligonucleotide
tg

SEQ ID NO: 13561 - DNA, 2 bp, Artificial Sequence
  Description of Artificial Sequence: Synthetic oligonucleotide
tg

SEQ ID NO: 13562 - DNA, 2 bp, Artificial Sequence
  Description of Artificial Sequence: Synthetic oligonucleotide
tg

SEQ ID NO: 13563 - DNA, 2 bp, Artificial Sequence
  Description of Artificial Sequence: Synthetic oligonucleotide
tg

SEQ ID NO: 13564 - DNA, 12 bp, Artificial Sequence
  Description of Artificial Sequence: Synthetic oligonucleotide
tggggtaggttg

SEQ ID NO: 13565 - DNA, 2 bp, Artificial Sequence
  Description of Artificial Sequence: Synthetic oligonucleotide
tg

SEQ ID NO: 13566 - DNA, 2 bp, Artificial Sequence
  Description of Artificial Sequence: Synthetic oligonucleotide
tg

SEQ ID NO: 13567 - DNA, 2 bp, Artificial Sequence
  Description of Artificial Sequence: Synthetic oligonucleotide
tg

SEQ ID NO: 13568 - DNA, 2 bp, Artificial Sequence
  Description of Artificial Sequence: Synthetic oligonucleotide
tg

SEQ ID NO: 13569 - DNA, 2 bp, Artificial Sequence
  Description of Artificial Sequence: Synthetic oligonucleotide
tg

SEQ ID NO: 13570 - DNA, 2 bp, Artificial Sequence
  Description of Artificial Sequence: Synthetic oligonucleotide
tg

SEQ ID NO: 13571 - DNA, 2 bp, Artificial Sequence
  Description of Artificial Sequence: Synthetic oligonucleotide
tg

SEQ ID NO: 13572 - DNA, 2 bp, Artificial Sequence
  Description of Artificial Sequence: Synthetic oligonucleotide
tg

SEQ ID NO: 13573 - DNA, 2 bp, Artificial Sequence
  Description of Artificial Sequence: Synthetic oligonucleotide
tg

SEQ ID NO: 13574 - DNA, 2 bp, Artificial Sequence
  Description of Artificial Sequence: Synthetic oligonucleotide
tg

SEQ ID NO: 13575 - DNA, 2 bp, Artificial Sequence
  Description of Artificial Sequence: Synthetic oligonucleotide
tg

SEQ ID NO: 13576 - DNA, 2 bp, Artificial Sequence
  Description of Artificial Sequence: Synthetic oligonucleotide
tg

SEQ ID NO: 13577 - DNA, 2 bp, Artificial Sequence
  Description of Artificial Sequence: Synthetic oligonucleotide
tg

SEQ ID NO: 13578 - DNA, 2 bp, Artificial Sequence
  Description of Artificial Sequence: Synthetic oligonucleotide
tg

SEQ ID NO: 13579 - DNA, 2 bp, Artificial Sequence
  Description of Artificial Sequence: Synthetic oligonucleotide
tg

SEQ ID NO: 13580 - DNA, 2 bp, Artificial Sequence
  Description of Artificial Sequence: Synthetic oligonucleotide
tg

SEQ ID NO: 13581 - DNA, 2 bp, Artificial Sequence
  Description of Artificial Sequence: Synthetic oligonucleotide
tg

SEQ ID NO: 13582 - DNA, 2 bp, Artificial Sequence
  Description of Artificial Sequence: Synthetic oligonucleotide
tg

SEQ ID NO: 13583 - DNA, 2 bp, Artificial Sequence
  Description of Artificial Sequence: Synthetic oligonucleotide
tg

SEQ ID NO: 13584 - DNA, 2 bp, Artificial Sequence
  Description of Artificial Sequence: Synthetic oligonucleotide
tg

SEQ ID NO: 13585 - DNA, 2 bp, Artificial Sequence
  Description of Artificial Sequence: Synthetic oligonucleotide
tg

SEQ ID NO: 13586 - DNA, 80 bp, Artificial Sequence
  Description of Artificial Sequence: Synthetic oligonucleotide
tgtatttgtgttaggagtatggatttatttagggagtgtttgggtggagaagtagtttttgttttaggttttttgttgtg

SEQ ID NO: 13587 - DNA, 2 bp, Artificial Sequence
  Description of Artificial Sequence: Synthetic oligonucleotide
tg

SEQ ID NO: 13588 - DNA, 2 bp, Artificial Sequence
  Description of Artificial Sequence: Synthetic oligonucleotide
tg

SEQ ID NO: 13589 - DNA, 2 bp, Artificial Sequence
  Description of Artificial Sequence: Synthetic oligonucleotide
tg

SEQ ID NO: 13590 - DNA, 2 bp, Artificial Sequence
  Description of Artificial Sequence: Synthetic oligonucleotide
tg

SEQ ID NO: 13591 - DNA, 2 bp, Artificial Sequence
  Description of Artificial Sequence: Synthetic oligonucleotide
tg

SEQ ID NO: 13592 - DNA, 2 bp, Artificial Sequence
  Description of Artificial Sequence: Synthetic oligonucleotide
tg

SEQ ID NO: 13593 - DNA, 2 bp, Artificial Sequence
  Description of Artificial Sequence: Synthetic oligonucleotide
tg

SEQ ID NO: 13594 - DNA, 2 bp, Artificial Sequence
  Description of Artificial Sequence: Synthetic oligonucleotide
tg

SEQ ID NO: 13595 - DNA, 2 bp, Artificial Sequence
  Description of Artificial Sequence: Synthetic oligonucleotide
tg

SEQ ID NO: 13596 - DNA, 2 bp, Artificial Sequence
  Description of Artificial Sequence: Synthetic oligonucleotide
tg

SEQ ID NO: 13597 - DNA, 4 bp, Artificial Sequence
  Description of Artificial Sequence: Synthetic oligonucleotide
tgtg

SEQ ID NO: 13598 - DNA, 2 bp, Artificial Sequence
  Description of Artificial Sequence: Synthetic oligonucleotide
tg

SEQ ID NO: 13599 - DNA, 2 bp, Artificial Sequence
  Description of Artificial Sequence: Synthetic oligonucleotide
tg

SEQ ID NO: 13600 - DNA, 2 bp, Artificial Sequence
  Description of Artificial Sequence: Synthetic oligonucleotide
tg

SEQ ID NO: 13601 - DNA, 2 bp, Artificial Sequence
  Description of Artificial Sequence: Synthetic oligonucleotide
tg

SEQ ID NO: 13602 - DNA, 2 bp, Artificial Sequence
  Description of Artificial Sequence: Synthetic oligonucleotide
tg

SEQ ID NO: 13603 - DNA, 2 bp, Artificial Sequence
  Description of Artificial Sequence: Synthetic oligonucleotide
tg

SEQ ID NO: 13604 - DNA, 2 bp, Artificial Sequence
  Description of Artificial Sequence: Synthetic oligonucleotide
tg

SEQ ID NO: 13605 - DNA, 2 bp, Artificial Sequence
  Description of Artificial Sequence: Synthetic oligonucleotide
tg

SEQ ID NO: 13606 - DNA, 2 bp, Artificial Sequence
  Description of Artificial Sequence: Synthetic oligonucleotide
tg

SEQ ID NO: 13607 - DNA, 2 bp, Artificial Sequence
  Description of Artificial Sequence: Synthetic oligonucleotide
tg

SEQ ID NO: 13608 - DNA, 3039 bp, Artificial Sequence
  Description of Artificial Sequence: Synthetic polynucleotide
tgttagatttggggttgttgtggagtttttgatttgaatttagggtgtgtgttgtgtttatggggggatattttaaagtggtaagaatgttttttgggaagggaataggatgttaggtttgaaaggggattttgaagtagtttaggaaaaaattttttatggattatggtgtttttttggtagtttttttgttaggtttgagggggttgttgtgttttaggtttgtatttagggttttatggggggtattttaaagtggtaagtaggtttttaggggaaggggatagtatgttaggtttggagggggatgttgaggtagttttgggaataaagaggggatgttggggttttgttatggataatattgtttttttgatagtatttgtggtgggtttgggagtgttatggagtttttggtttgtatttaaggtgtgtgttttgtttttggggggtattataaagtggtaagaaggttattgggggaagggtatgggatgttagggttgaaagggatagttgaggtagtttggggaaaaatgtggtaggttggggttgttttatggatgatagtgtttttttagtagtttttgtgttaggtttggggtggttgtggagtttttggtttgtattgagggtgtgggttgtatttatgggggtattttaaagtggtaagaaggttgttgggtgaatgttatagaaggttaggttttaatggggatgttgaggtagtatagagagaaaagtggttagttgggttttttttatggatgatagtgtttttttggtagtttttgtgttgggtttggggggattgtggagtttttattttgtatttagggtgtgtgttttgtttatgggaggtattttaaagtggtaagtaggtttttgggggaaggggatagtattttagatttgaagggggattttgaggtagtttgtggaaaaaaatggtgatgttgagttttttttataaatgatagtgtttttttggtagtttttttgttgggttagggtggttttggagtttgtggtttgtatttagggtgtgtgttttgtttaagggggtattttaaagtggtaagtagatttttgggggaagggagagtatgttaggtttgaaggggaggttgaggtggttttggggtaaaagtggtgaagttggggtttttttatggatgatattgtttttttggtagtttttgtagtgggtttagaggtgttgtggagtttttggtttgtttttaggttgtgtgttttgtttatgagtggtattataaagtagtaagaaggtttttaggggaagggtataggattttagggttgaaaggtagagttgaggtagattggtgttattttaaggataatagtgttttgtttggtagtttttgtattgggtttggggtggttgtggagtttttggtttgtatttggggtgtgtgttgtgtttatgatgggtattgtaatgtggtaagaagtttttgagtggaagggaataggatgttgagtttgaaaggggatgttgaggtagtttggggaaaaaatttttattgagaatagtgtttttttggtagtttttgagtgggatttaggtggatggtggagtttttggtttggatttagggtgtttgttttgtttatggggtgtatgtgaaagtggtaatagggtttttgggggaaggggataatatgttaggtttgaagagggatgttgggttagttagaggaaaatagtggttaggttgtggttgttttatagattatagtgtttttttggtagtttttgagtttggtttaggtgggggggtttggagtttttgttttgtaatagagtgtgtgttttgtttaagtgtgtatgtgaaagttgtaagaagggttttgggggaagggaataggatgttaggtttgaaaggggattttgaggtagtttagggaaaaattttttatggaggatagtgattttttgatattttttgtgtttggttttgggggttttggagtttttggtttatatttagggtgtgtgttttgtttatgggtggtattttaaagtagtaagaaagttttggggggggaagaataggatgttagatttgaaaggggatgttgaggtagtttaggaaaaaaaggggtgaggttggggtttttttatggatgatagtgttttttttatagtttttatgttagttttgggagggttgtggagtttttgttttgtatataatgtgtgtgttttgtttatggggggtattttaaagtggtaagaagttttttgtgggaaggtaataggatgttaggtttgaatggggatgtttaggtagtttggagaaaaaagtagtgaggttggggtgattttatgaatgatagtgttttattggtagtttttttgttgggtatgtgggggttgttgattttttggtttgtatttagggtgagtgttttgtttatggtgggtattataaagtagtaagaaggtttttgggggaaagggatagtatgttagttttgaagggggaagttgaggtagttttggggaaaaaaagtggggatgttggggtttttttatggatgatattgtttttttagtagtttttgtagtgggtttgggagtgttttggagtttttgttttgtattttgggtgtgtgttttatttatggggagtattataaagtggtaagaaggttattgggggaagggtataggatgttagggttgaaggggatagtggagatagtttaaggaaaaaagtggtgggatggtgttgttttaaggatggttatttttgtgttgggttagggatggttgtggagtttttggtttgtatttaggttgtgtgttttgtttatagggggtattttaaagtagtatgaaggtttttaggggaagggaagaggatgttaggtttggaaggtgatgttgaggtagtagggggtaaaaagtggtgggttgggtttttttatggatgatagtgtttttttggaagttgttgtgtagggtttggtgtgtttgtggagtttttggtttgtatttagaattgtgtg

SEQ ID NO: 13609 - DNA, 2 bp, Artificial Sequence
  Description of Artificial Sequence: Synthetic oligonucleotide
tg

SEQ ID NO: 13610 - DNA, 2 bp, Artificial Sequence
  Description of Artificial Sequence: Synthetic oligonucleotide
tg

SEQ ID NO: 13611 - DNA, 2 bp, Artificial Sequence
  Description of Artificial Sequence: Synthetic oligonucleotide
tg

SEQ ID NO: 13612 - DNA, 2 bp, Artificial Sequence
  Description of Artificial Sequence: Synthetic oligonucleotide
tg

SEQ ID NO: 13613 - DNA, 2 bp, Artificial Sequence
  Description of Artificial Sequence: Synthetic oligonucleotide
tg

SEQ ID NO: 13614 - DNA, 2 bp, Artificial Sequence
  Description of Artificial Sequence: Synthetic oligonucleotide
tg

SEQ ID NO: 13615 - DNA, 2 bp, Artificial Sequence
  Description of Artificial Sequence: Synthetic oligonucleotide
tg

SEQ ID NO: 13616 - DNA, 2 bp, Artificial Sequence
  Description of Artificial Sequence: Synthetic oligonucleotide
tg

SEQ ID NO: 13617 - DNA, 2 bp, Artificial Sequence
  Description of Artificial Sequence: Synthetic oligonucleotide
tg

SEQ ID NO: 13618 - DNA, 2 bp, Artificial Sequence
  Description of Artificial Sequence: Synthetic oligonucleotide
tg

SEQ ID NO: 13619 - DNA, 2 bp, Artificial Sequence
  Description of Artificial Sequence: Synthetic oligonucleotide
yg

SEQ ID NO: 13620 - DNA, 9 bp, Artificial Sequence
  Description of Artificial Sequence: Synthetic oligonucleotide
ygttattyg

SEQ ID NO: 13621 - DNA, 2 bp, Artificial Sequence
  Description of Artificial Sequence: Synthetic oligonucleotide
yg

SEQ ID NO: 13622 - DNA, 2 bp, Artificial Sequence
  Description of Artificial Sequence: Synthetic oligonucleotide
yg

SEQ ID NO: 13623 - DNA, 2 bp, Artificial Sequence
  Description of Artificial Sequence: Synthetic oligonucleotide
yg

SEQ ID NO: 13624 - DNA, 2 bp, Artificial Sequence
  Description of Artificial Sequence: Synthetic oligonucleotide
yg

SEQ ID NO: 13625 - DNA, 2 bp, Artificial Sequence
  Description of Artificial Sequence: Synthetic oligonucleotide
yg

SEQ ID NO: 13626 - DNA, 2 bp, Artificial Sequence
  Description of Artificial Sequence: Synthetic oligonucleotide
yg

SEQ ID NO: 13627 - DNA, 2 bp, Artificial Sequence
  Description of Artificial Sequence: Synthetic oligonucleotide
yg

SEQ ID NO: 13628 - DNA, 2 bp, Artificial Sequence
  Description of Artificial Sequence: Synthetic oligonucleotide
yg

SEQ ID NO: 13629 - DNA, 2 bp, Artificial Sequence
  Description of Artificial Sequence: Synthetic oligonucleotide
yg

SEQ ID NO: 13630 - DNA, 2 bp, Artificial Sequence
  Description of Artificial Sequence: Synthetic oligonucleotide
yg

SEQ ID NO: 13631 - DNA, 36 bp, Artificial Sequence
  Description of Artificial Sequence: Synthetic oligonucleotide
ygtaggttagtgggtgygygtattttgygtgagtyg

SEQ ID NO: 13632 - DNA, 2 bp, Artificial Sequence
  Description of Artificial Sequence: Synthetic oligonucleotide
yg

SEQ ID NO: 13633 - DNA, 2 bp, Artificial Sequence
  Description of Artificial Sequence: Synthetic oligonucleotide
yg

SEQ ID NO: 13634 - DNA, 2 bp, Artificial Sequence
  Description of Artificial Sequence: Synthetic oligonucleotide
yg

SEQ ID NO: 13635 - DNA, 2 bp, Artificial Sequence
  Description of Artificial Sequence: Synthetic oligonucleotide
yg

SEQ ID NO: 13636 - DNA, 2 bp, Artificial Sequence
  Description of Artificial Sequence: Synthetic oligonucleotide
yg

SEQ ID NO: 13637 - DNA, 2 bp, Artificial Sequence
  Description of Artificial Sequence: Synthetic oligonucleotide
yg

SEQ ID NO: 13638 - DNA, 2 bp, Artificial Sequence
  Description of Artificial Sequence: Synthetic oligonucleotide
yg

SEQ ID NO: 13639 - DNA, 2 bp, Artificial Sequence
  Description of Artificial Sequence: Synthetic oligonucleotide
yg

SEQ ID NO: 13640 - DNA, 2 bp, Artificial Sequence
  Description of Artificial Sequence: Synthetic oligonucleotide
yg

SEQ ID NO: 13641 - DNA, 2 bp, Artificial Sequence
  Description of Artificial Sequence: Synthetic oligonucleotide
yg

SEQ ID NO: 13642 - DNA, 8 bp, Artificial Sequence
  Description of Artificial Sequence: Synthetic oligonucleotide
ygtygtyg

SEQ ID NO: 13643 - DNA, 2 bp, Artificial Sequence
  Description of Artificial Sequence: Synthetic oligonucleotide
yg

SEQ ID NO: 13644 - DNA, 2 bp, Artificial Sequence
  Description of Artificial Sequence: Synthetic oligonucleotide
yg

SEQ ID NO: 13645 - DNA, 2 bp, Artificial Sequence
  Description of Artificial Sequence: Synthetic oligonucleotide
yg

SEQ ID NO: 13646 - DNA, 2 bp, Artificial Sequence
  Description of Artificial Sequence: Synthetic oligonucleotide
yg

SEQ ID NO: 13647 - DNA, 2 bp, Artificial Sequence
  Description of Artificial Sequence: Synthetic oligonucleotide
yg

SEQ ID NO: 13648 - DNA, 2 bp, Artificial Sequence
  Description of Artificial Sequence: Synthetic oligonucleotide
yg

SEQ ID NO: 13649 - DNA, 2 bp, Artificial Sequence
  Description of Artificial Sequence: Synthetic oligonucleotide
yg

SEQ ID NO: 13650 - DNA, 2 bp, Artificial Sequence
  Description of Artificial Sequence: Synthetic oligonucleotide
yg

SEQ ID NO: 13651 - DNA, 2 bp, Artificial Sequence
  Description of Artificial Sequence: Synthetic oligonucleotide
yg

SEQ ID NO: 13652 - DNA, 2 bp, Artificial Sequence
  Description of Artificial Sequence: Synthetic oligonucleotide
yg

SEQ ID NO: 13653 - DNA, 181 bp, Artificial Sequence
  Description of Artificial Sequence: Synthetic polynucleotide
ygatttttttgttttagtttttygagtagttgggattataggtataygttattaygtttagttaatttttgtttgtttgtttatttatttattattatttttgagayggagtttygttttgttattaggttggagtgttattggagtgtaatggtaygatttyggtttattgtaattttyg

SEQ ID NO: 13654 - DNA, 2 bp, Artificial Sequence
  Description of Artificial Sequence: Synthetic oligonucleotide
yg

SEQ ID NO: 13655 - DNA, 2 bp, Artificial Sequence
  Description of Artificial Sequence: Synthetic oligonucleotide
yg

SEQ ID NO: 13656 - DNA, 2 bp, Artificial Sequence
  Description of Artificial Sequence: Synthetic oligonucleotide
yg

SEQ ID NO: 13657 - DNA, 2 bp, Artificial Sequence
  Description of Artificial Sequence: Synthetic oligonucleotide
yg

SEQ ID NO: 13658 - DNA, 2 bp, Artificial Sequence
  Description of Artificial Sequence: Synthetic oligonucleotide
yg

SEQ ID NO: 13659 - DNA, 2 bp, Artificial Sequence
  Description of Artificial Sequence: Synthetic oligonucleotide
yg

SEQ ID NO: 13660 - DNA, 2 bp, Artificial Sequence
  Description of Artificial Sequence: Synthetic oligonucleotide
yg

SEQ ID NO: 13661 - DNA, 2 bp, Artificial Sequence
  Description of Artificial Sequence: Synthetic oligonucleotide
yg

SEQ ID NO: 13662 - DNA, 2 bp, Artificial Sequence
  Description of Artificial Sequence: Synthetic oligonucleotide
yg

SEQ ID NO: 13663 - DNA, 2 bp, Artificial Sequence
  Description of Artificial Sequence: Synthetic oligonucleotide
yg

SEQ ID NO: 13664 - DNA, 369 bp, Artificial Sequence
  Description of Artificial Sequence: Synthetic polynucleotide
yggggaggtttgggttgtataggagygtayggygggggtggaggtttaggtatggagggttgtaggtttygagttttgttyggyggggaggtagttaaggtttagygagaagtygagtatagtagttgttggtttaggtgttaagttttttattgttygggtyggttggtygtttygagtgyggggtttgttaagtttaygtttattyggaattygagttggttygtaagygtagtttgtagttayggttttygtttaygtttttttttttatatttattygtaagttgagggagtyggttttagttttgtttagtttagaaaggggtttttatagtgtagygaygggttgaagggttttttaaaygyg

SEQ ID NO: 13665 - DNA, 2 bp, Artificial Sequence
  Description of Artificial Sequence: Synthetic oligonucleotide
yg

SEQ ID NO: 13666 - DNA, 2 bp, Artificial Sequence
  Description of Artificial Sequence: Synthetic oligonucleotide
yg

SEQ ID NO: 13667 - DNA, 2 bp, Artificial Sequence
  Description of Artificial Sequence: Synthetic oligonucleotide
yg

SEQ ID NO: 13668 - DNA, 2 bp, Artificial Sequence
  Description of Artificial Sequence: Synthetic oligonucleotide
yg

SEQ ID NO: 13669 - DNA, 2 bp, Artificial Sequence
  Description of Artificial Sequence: Synthetic oligonucleotide
yg

SEQ ID NO: 13670 - DNA, 2 bp, Artificial Sequence
  Description of Artificial Sequence: Synthetic oligonucleotide
yg

SEQ ID NO: 13671 - DNA, 2 bp, Artificial Sequence
  Description of Artificial Sequence: Synthetic oligonucleotide
yg

SEQ ID NO: 13672 - DNA, 2 bp, Artificial Sequence
  Description of Artificial Sequence: Synthetic oligonucleotide
yg

SEQ ID NO: 13673 - DNA, 2 bp, Artificial Sequence
  Description of Artificial Sequence: Synthetic oligonucleotide
yg

SEQ ID NO: 13674 - DNA, 2 bp, Artificial Sequence
  Description of Artificial Sequence: Synthetic oligonucleotide
yg

SEQ ID NO: 13675 - DNA, 2 bp, Artificial Sequence
  Description of Artificial Sequence: Synthetic oligonucleotide
yg

SEQ ID NO: 13676 - DNA, 2 bp, Artificial Sequence
  Description of Artificial Sequence: Synthetic oligonucleotide
yg

SEQ ID NO: 13677 - DNA, 2 bp, Artificial Sequence
  Description of Artificial Sequence: Synthetic oligonucleotide
yg

SEQ ID NO: 13678 - DNA, 2 bp, Artificial Sequence
  Description of Artificial Sequence: Synthetic oligonucleotide
yg

SEQ ID NO: 13679 - DNA, 2 bp, Artificial Sequence
  Description of Artificial Sequence: Synthetic oligonucleotide
yg

SEQ ID NO: 13680 - DNA, 2 bp, Artificial Sequence
  Description of Artificial Sequence: Synthetic oligonucleotide
yg

SEQ ID NO: 13681 - DNA, 2 bp, Artificial Sequence
  Description of Artificial Sequence: Synthetic oligonucleotide
yg

SEQ ID NO: 13682 - DNA, 2 bp, Artificial Sequence
  Description of Artificial Sequence: Synthetic oligonucleotide
yg

SEQ ID NO: 13683 - DNA, 2 bp, Artificial Sequence
  Description of Artificial Sequence: Synthetic oligonucleotide
yg

SEQ ID NO: 13684 - DNA, 2 bp, Artificial Sequence
  Description of Artificial Sequence: Synthetic oligonucleotide
yg

SEQ ID NO: 13685 - DNA, 2 bp, Artificial Sequence
  Description of Artificial Sequence: Synthetic oligonucleotide
yg

SEQ ID NO: 13686 - DNA, 35 bp, Artificial Sequence
  Description of Artificial Sequence: Synthetic oligonucleotide
yggtagtaaatgaagtygaggtagtggtgtaagyg

SEQ ID NO: 13687 - DNA, 2 bp, Artificial Sequence
  Description of Artificial Sequence: Synthetic oligonucleotide
yg

SEQ ID NO: 13688 - DNA, 2 bp, Artificial Sequence
  Description of Artificial Sequence: Synthetic oligonucleotide
yg

SEQ ID NO: 13689 - DNA, 2 bp, Artificial Sequence
  Description of Artificial Sequence: Synthetic oligonucleotide
yg

SEQ ID NO: 13690 - DNA, 2 bp, Artificial Sequence
  Description of Artificial Sequence: Synthetic oligonucleotide
yg

SEQ ID NO: 13691 - DNA, 2 bp, Artificial Sequence
  Description of Artificial Sequence: Synthetic oligonucleotide
yg

SEQ ID NO: 13692 - DNA, 2 bp, Artificial Sequence
  Description of Artificial Sequence: Synthetic oligonucleotide
yg

SEQ ID NO: 13693 - DNA, 2 bp, Artificial Sequence
  Description of Artificial Sequence: Synthetic oligonucleotide
yg

SEQ ID NO: 13694 - DNA, 2 bp, Artificial Sequence
  Description of Artificial Sequence: Synthetic oligonucleotide
yg

SEQ ID NO: 13695 - DNA, 2 bp, Artificial Sequence
  Description of Artificial Sequence: Synthetic oligonucleotide
yg

SEQ ID NO: 13696 - DNA, 2 bp, Artificial Sequence
  Description of Artificial Sequence: Synthetic oligonucleotide
yg

SEQ ID NO: 13697 - DNA, 487 bp, Artificial Sequence
  Description of Artificial Sequence: Synthetic polynucleotide
ygttttttgtttgttttaaagggtaaggttttttygtttygygtttygtttttgttttatttaggtttygttattatgttygggggttttattygggattggtttttgttttgygtagtaaattyggaagtggattaygtggagtaaaggttttatygaggygygtgagttttgttttgttttgtattaagtttgtattttttaggtttttggtatttttgtttttgggaygtggggtttttatagatttggaaatttttgtttgtttttttttatttagagtaaattgagaygtttataagagtttggaagttgtttttttttgggtttgaagtygtttggaggttggtttygttttyggtttttttgttatagggtaatgtatatattttttatygtatagtttttttgtttaaaattttgttgatttattttgttttttgttttttaaagtttttattygtgygttggattttygttttgggyg

SEQ ID NO: 13698 - DNA, 2 bp, Artificial Sequence
  Description of Artificial Sequence: Synthetic oligonucleotide
yg

SEQ ID NO: 13699 - DNA, 2 bp, Artificial Sequence
  Description of Artificial Sequence: Synthetic oligonucleotide
yg

SEQ ID NO: 13700 - DNA, 2 bp, Artificial Sequence
  Description of Artificial Sequence: Synthetic oligonucleotide
yg

SEQ ID NO: 13701 - DNA, 2 bp, Artificial Sequence
  Description of Artificial Sequence: Synthetic oligonucleotide
yg

SEQ ID NO: 13702 - DNA, 2 bp, Artificial Sequence
  Description of Artificial Sequence: Synthetic oligonucleotide
yg

SEQ ID NO: 13703 - DNA, 2 bp, Artificial Sequence
  Description of Artificial Sequence: Synthetic oligonucleotide
yg

SEQ ID NO: 13704 - DNA, 2 bp, Artificial Sequence
  Description of Artificial Sequence: Synthetic oligonucleotide
yg

SEQ ID NO: 13705 - DNA, 2 bp, Artificial Sequence
  Description of Artificial Sequence: Synthetic oligonucleotide
yg

SEQ ID NO: 13706 - DNA, 2 bp, Artificial Sequence
  Description of Artificial Sequence: Synthetic oligonucleotide
yg

SEQ ID NO: 13707 - DNA, 2 bp, Artificial Sequence
  Description of Artificial Sequence: Synthetic oligonucleotide
yg

SEQ ID NO: 13708 - DNA, 28 bp, Artificial Sequence
  Description of Artificial Sequence: Synthetic oligonucleotide
yggattaygaggttaggagattaagayg

SEQ ID NO: 13709 - DNA, 2 bp, Artificial Sequence
  Description of Artificial Sequence: Synthetic oligonucleotide
yg

SEQ ID NO: 13710 - DNA, 2 bp, Artificial Sequence
  Description of Artificial Sequence: Synthetic oligonucleotide
yg

SEQ ID NO: 13711 - DNA, 2 bp, Artificial Sequence
  Description of Artificial Sequence: Synthetic oligonucleotide
yg

SEQ ID NO: 13712 - DNA, 2 bp, Artificial Sequence
  Description of Artificial Sequence: Synthetic oligonucleotide
yg

SEQ ID NO: 13713 - DNA, 2 bp, Artificial Sequence
  Description of Artificial Sequence: Synthetic oligonucleotide
yg

SEQ ID NO: 13714 - DNA, 2 bp, Artificial Sequence
  Description of Artificial Sequence: Synthetic oligonucleotide
yg

SEQ ID NO: 13715 - DNA, 2 bp, Artificial Sequence
  Description of Artificial Sequence: Synthetic oligonucleotide
yg

SEQ ID NO: 13716 - DNA, 2 bp, Artificial Sequence
  Description of Artificial Sequence: Synthetic oligonucleotide
yg

SEQ ID NO: 13717 - DNA, 2 bp, Artificial Sequence
  Description of Artificial Sequence: Synthetic oligonucleotide
yg

SEQ ID NO: 13718 - DNA, 2 bp, Artificial Sequence
  Description of Artificial Sequence: Synthetic oligonucleotide
yg

SEQ ID NO: 13719 - DNA, 2 bp, Artificial Sequence
  Description of Artificial Sequence: Synthetic oligonucleotide
yg

SEQ ID NO: 13720 - DNA, 2 bp, Artificial Sequence
  Description of Artificial Sequence: Synthetic oligonucleotide
yg

SEQ ID NO: 13721 - DNA, 2 bp, Artificial Sequence
  Description of Artificial Sequence: Synthetic oligonucleotide
yg

SEQ ID NO: 13722 - DNA, 2 bp, Artificial Sequence
  Description of Artificial Sequence: Synthetic oligonucleotide
yg

SEQ ID NO: 13723 - DNA, 2 bp, Artificial Sequence
  Description of Artificial Sequence: Synthetic oligonucleotide
yg

SEQ ID NO: 13724 - DNA, 2 bp, Artificial Sequence
  Description of Artificial Sequence: Synthetic oligonucleotide
yg

SEQ ID NO: 13725 - DNA, 2 bp, Artificial Sequence
  Description of Artificial Sequence: Synthetic oligonucleotide
yg

SEQ ID NO: 13726 - DNA, 2 bp, Artificial Sequence
  Description of Artificial Sequence: Synthetic oligonucleotide
yg

SEQ ID NO: 13727 - DNA, 2 bp, Artificial Sequence
  Description of Artificial Sequence: Synthetic oligonucleotide
yg

SEQ ID NO: 13728 - DNA, 2 bp, Artificial Sequence
  Description of Artificial Sequence: Synthetic oligonucleotide
yg

SEQ ID NO: 13729 - DNA, 2 bp, Artificial Sequence
  Description of Artificial Sequence: Synthetic oligonucleotide
yg

SEQ ID NO: 13730 - DNA, 18 bp, Artificial Sequence
  Description of Artificial Sequence: Synthetic oligonucleotide
ygyggttaggaaggygyg

SEQ ID NO: 13731 - DNA, 18 bp, Artificial Sequence
  Description of Artificial Sequence: Synthetic oligonucleotide
ygtatttattgatttgyg

SEQ ID NO: 13732 - DNA, 2 bp, Artificial Sequence
  Description of Artificial Sequence: Synthetic oligonucleotide
yg

SEQ ID NO: 13733 - DNA, 2 bp, Artificial Sequence
  Description of Artificial Sequence: Synthetic oligonucleotide
yg

SEQ ID NO: 13734 - DNA, 2 bp, Artificial Sequence
  Description of Artificial Sequence: Synthetic oligonucleotide
yg

SEQ ID NO: 13735 - DNA, 2 bp, Artificial Sequence
  Description of Artificial Sequence: Synthetic oligonucleotide
yg

SEQ ID NO: 13736 - DNA, 2 bp, Artificial Sequence
  Description of Artificial Sequence: Synthetic oligonucleotide
yg

SEQ ID NO: 13737 - DNA, 2 bp, Artificial Sequence
  Description of Artificial Sequence: Synthetic oligonucleotide
yg

SEQ ID NO: 13738 - DNA, 2 bp, Artificial Sequence
  Description of Artificial Sequence: Synthetic oligonucleotide
yg

SEQ ID NO: 13739 - DNA, 2 bp, Artificial Sequence
  Description of Artificial Sequence: Synthetic oligonucleotide
yg

SEQ ID NO: 13740 - DNA, 2 bp, Artificial Sequence
  Description of Artificial Sequence: Synthetic oligonucleotide
yg

SEQ ID NO: 13741 - DNA, 2 bp, Artificial Sequence
  Description of Artificial Sequence: Synthetic oligonucleotide
yg

SEQ ID NO: 13742 - DNA, 87 bp, Artificial Sequence
  Description of Artificial Sequence: Synthetic oligonucleotide
ygttatttatttatttgattyggaaagggaattttttgattttttgygttttttaggtgaggtaatgtttygttttgtttyggttyg

SEQ ID NO: 13743 - DNA, 2 bp, Artificial Sequence
  Description of Artificial Sequence: Synthetic oligonucleotide
yg

SEQ ID NO: 13744 - DNA, 2 bp, Artificial Sequence
  Description of Artificial Sequence: Synthetic oligonucleotide
yg

SEQ ID NO: 13745 - DNA, 2 bp, Artificial Sequence
  Description of Artificial Sequence: Synthetic oligonucleotide
yg

SEQ ID NO: 13746 - DNA, 2 bp, Artificial Sequence
  Description of Artificial Sequence: Synthetic oligonucleotide
yg

SEQ ID NO: 13747 - DNA, 2 bp, Artificial Sequence
  Description of Artificial Sequence: Synthetic oligonucleotide
yg

SEQ ID NO: 13748 - DNA, 2 bp, Artificial Sequence
  Description of Artificial Sequence: Synthetic oligonucleotide
yg

SEQ ID NO: 13749 - DNA, 2 bp, Artificial Sequence
  Description of Artificial Sequence: Synthetic oligonucleotide
yg

SEQ ID NO: 13750 - DNA, 2 bp, Artificial Sequence
  Description of Artificial Sequence: Synthetic oligonucleotide
yg

SEQ ID NO: 13751 - DNA, 2 bp, Artificial Sequence
  Description of Artificial Sequence: Synthetic oligonucleotide
yg

SEQ ID NO: 13752 - DNA, 2 bp, Artificial Sequence
  Description of Artificial Sequence: Synthetic oligonucleotide
yg

SEQ ID NO: 13753 - DNA, 11 bp, Artificial Sequence
  Description of Artificial Sequence: Synthetic oligonucleotide
ygtaagtttyg

SEQ ID NO: 13754 - DNA, 2 bp, Artificial Sequence
  Description of Artificial Sequence: Synthetic oligonucleotide
yg

SEQ ID NO: 13755 - DNA, 2 bp, Artificial Sequence
  Description of Artificial Sequence: Synthetic oligonucleotide
yg

SEQ ID NO: 13756 - DNA, 2 bp, Artificial Sequence
  Description of Artificial Sequence: Synthetic oligonucleotide
yg

SEQ ID NO: 13757 - DNA, 2 bp, Artificial Sequence
  Description of Artificial Sequence: Synthetic oligonucleotide
yg

SEQ ID NO: 13758 - DNA, 2 bp, Artificial Sequence
  Description of Artificial Sequence: Synthetic oligonucleotide
yg

SEQ ID NO: 13759 - DNA, 2 bp, Artificial Sequence
  Description of Artificial Sequence: Synthetic oligonucleotide
yg

SEQ ID NO: 13760 - DNA, 2 bp, Artificial Sequence
  Description of Artificial Sequence: Synthetic oligonucleotide
yg

SEQ ID NO: 13761 - DNA, 2 bp, Artificial Sequence
  Description of Artificial Sequence: Synthetic oligonucleotide
yg

SEQ ID NO: 13762 - DNA, 2 bp, Artificial Sequence
  Description of Artificial Sequence: Synthetic oligonucleotide
yg

SEQ ID NO: 13763 - DNA, 2 bp, Artificial Sequence
  Description of Artificial Sequence: Synthetic oligonucleotide
yg

SEQ ID NO: 13764 - DNA, 2 bp, Artificial Sequence
  Description of Artificial Sequence: Synthetic oligonucleotide
yg

SEQ ID NO: 13765 - DNA, 2 bp, Artificial Sequence
  Description of Artificial Sequence: Synthetic oligonucleotide
yg

SEQ ID NO: 13766 - DNA, 2 bp, Artificial Sequence
  Description of Artificial Sequence: Synthetic oligonucleotide
yg

SEQ ID NO: 13767 - DNA, 2 bp, Artificial Sequence
  Description of Artificial Sequence: Synthetic oligonucleotide
yg

SEQ ID NO: 13768 - DNA, 2 bp, Artificial Sequence
  Description of Artificial Sequence: Synthetic oligonucleotide
yg

SEQ ID NO: 13769 - DNA, 2 bp, Artificial Sequence
  Description of Artificial Sequence: Synthetic oligonucleotide
yg

SEQ ID NO: 13770 - DNA, 2 bp, Artificial Sequence
  Description of Artificial Sequence: Synthetic oligonucleotide
yg

SEQ ID NO: 13771 - DNA, 2 bp, Artificial Sequence
  Description of Artificial Sequence: Synthetic oligonucleotide
yg

SEQ ID NO: 13772 - DNA, 2 bp, Artificial Sequence
  Description of Artificial Sequence: Synthetic oligonucleotide
yg

SEQ ID NO: 13773 - DNA, 167 bp, Artificial Sequence
  Description of Artificial Sequence: Synthetic polynucleotide
ygttattttttaagtyggtttgaaaagygtaatattygggtgggagtgattygattttttaggtgygtyggttatttttttttttgattyggaaagggaattttttgatttttggygttttttaggtgaggtaatgtttygttttgtttyggttygtttayggtgyg

SEQ ID NO: 13774 - DNA, 2 bp, Artificial Sequence
  Description of Artificial Sequence: Synthetic oligonucleotide
yg

SEQ ID NO: 13775 - DNA, 2 bp, Artificial Sequence
  Description of Artificial Sequence: Synthetic oligonucleotide
yg

SEQ ID NO: 13776 - DNA, 2 bp, Artificial Sequence
  Description of Artificial Sequence: Synthetic oligonucleotide
yg

SEQ ID NO: 13777 - DNA, 185 bp, Artificial Sequence
  Description of Artificial Sequence: Synthetic polynucleotide
yggtgtttatataygttgtttttaaaaaaatttgttttgtttaggtttgtgtgaatataaygtyggatgaattttgtttttttagaagaaagtygggttggtgtgttygatgaygtagygtttgtagtggygtttgataaagygtagggtttttayggagatttygtagttttggatatttagyg

SEQ ID NO: 13778 - DNA, 17 bp, Artificial Sequence
  Description of Artificial Sequence: Synthetic oligonucleotide
ygttttgtttyggttyg

SEQ ID NO: 13779 - DNA, 135 bp, Artificial Sequence
  Description of Artificial Sequence: Synthetic polynucleotide
ygtaatattygggtgggagtgattygattttttaggtgygttygttatttttttttttgattaggaaagggaattttttgatttttggygtttttygagtgaggtattgttttattttgtttyggttygygtayg

SEQ ID NO: 13780 - DNA, 2 bp, Artificial Sequence
  Description of Artificial Sequence: Synthetic oligonucleotide
yg

SEQ ID NO: 13781 - DNA, 71 bp, Artificial Sequence
  Description of Artificial Sequence: Synthetic oligonucleotide
yggygggttgaagggttttttaagygyggttagagtgggtgttaaggtygaggaggygttaagagygagyg

SEQ ID NO: 13782 - DNA, 54 bp, Artificial Sequence
  Description of Artificial Sequence: Synthetic oligonucleotide
ygttttttaagtgaggtaatgtttygttttgtttyggttygygtayggtgygyg

SEQ ID NO: 13783 - DNA, 5 bp, Artificial Sequence
  Description of Artificial Sequence: Synthetic oligonucleotide
ygtyg

SEQ ID NO: 13784 - DNA, 29 bp, Artificial Sequence
  Description of Artificial Sequence: Synthetic oligonucleotide
ygttttttttaygggtttaaaaatyggyg

SEQ ID NO: 13785 - DNA, 18 bp, Artificial Sequence
  Description of Artificial Sequence: Synthetic oligonucleotide
ygtagatattagaaagyg

SEQ ID NO: 13786 - DNA, 2 bp, Artificial Sequence
  Description of Artificial Sequence: Synthetic oligonucleotide
yg

SEQ ID NO: 13787 - DNA, 5 bp, Artificial Sequence
  Description of Artificial Sequence: Synthetic oligonucleotide
ygtyg

SEQ ID NO: 13788 - DNA, 24 bp, Artificial Sequence
  Description of Artificial Sequence: Synthetic oligonucleotide
ygagtttgygtaggaggygtttyg

SEQ ID NO: 13789 - DNA, 2 bp, Artificial Sequence
  Description of Artificial Sequence: Synthetic oligonucleotide
yg

SEQ ID NO: 13790 - DNA, 4 bp, Artificial Sequence
  Description of Artificial Sequence: Synthetic oligonucleotide
ygyg

SEQ ID NO: 13791 - DNA, 2 bp, Artificial Sequence
  Description of Artificial Sequence: Synthetic oligonucleotide
yg

SEQ ID NO: 13792 - DNA, 2 bp, Artificial Sequence
  Description of Artificial Sequence: Synthetic oligonucleotide
yg

SEQ ID NO: 13793 - DNA, 2 bp, Artificial Sequence
  Description of Artificial Sequence: Synthetic oligonucleotide
yg

SEQ ID NO: 13794 - DNA, 2 bp, Artificial Sequence
  Description of Artificial Sequence: Synthetic oligonucleotide
yg

SEQ ID NO: 13795 - DNA, 2 bp, Artificial Sequence
  Description of Artificial Sequence: Synthetic oligonucleotide
yg

SEQ ID NO: 13796 - DNA, 2 bp, Artificial Sequence
  Description of Artificial Sequence: Synthetic oligonucleotide
yg

SEQ ID NO: 13797 - DNA, 2 bp, Artificial Sequence
  Description of Artificial Sequence: Synthetic oligonucleotide
yg

SEQ ID NO: 13798 - DNA, 2 bp, Artificial Sequence
  Description of Artificial Sequence: Synthetic oligonucleotide
yg

SEQ ID NO: 13799 - DNA, 2 bp, Artificial Sequence
  Description of Artificial Sequence: Synthetic oligonucleotide
yg

SEQ ID NO: 13800 - DNA, 2 bp, Artificial Sequence
  Description of Artificial Sequence: Synthetic oligonucleotide
yg

SEQ ID NO: 13801 - DNA, 12 bp, Artificial Sequence
  Description of Artificial Sequence: Synthetic oligonucleotide
ygatttgtttyg

SEQ ID NO: 13802 - DNA, 2 bp, Artificial Sequence
  Description of Artificial Sequence: Synthetic oligonucleotide
yg

SEQ ID NO: 13803 - DNA, 2 bp, Artificial Sequence
  Description of Artificial Sequence: Synthetic oligonucleotide
yg

SEQ ID NO: 13804 - DNA, 2 bp, Artificial Sequence
  Description of Artificial Sequence: Synthetic oligonucleotide
yg

SEQ ID NO: 13805 - DNA, 2 bp, Artificial Sequence
  Description of Artificial Sequence: Synthetic oligonucleotide
yg

SEQ ID NO: 13806 - DNA, 2 bp, Artificial Sequence
  Description of Artificial Sequence: Synthetic oligonucleotide
yg

SEQ ID NO: 13807 - DNA, 2 bp, Artificial Sequence
  Description of Artificial Sequence: Synthetic oligonucleotide
yg

SEQ ID NO: 13808 - DNA, 2 bp, Artificial Sequence
  Description of Artificial Sequence: Synthetic oligonucleotide
yg

SEQ ID NO: 13809 - DNA, 2 bp, Artificial Sequence
  Description of Artificial Sequence: Synthetic oligonucleotide
yg

SEQ ID NO: 13810 - DNA, 2 bp, Artificial Sequence
  Description of Artificial Sequence: Synthetic oligonucleotide
yg

SEQ ID NO: 13811 - DNA, 2 bp, Artificial Sequence
  Description of Artificial Sequence: Synthetic oligonucleotide
yg

SEQ ID NO: 13812 - DNA, 2 bp, Artificial Sequence
  Description of Artificial Sequence: Synthetic oligonucleotide
yg

SEQ ID NO: 13813 - DNA, 2 bp, Artificial Sequence
  Description of Artificial Sequence: Synthetic oligonucleotide
yg

SEQ ID NO: 13814 - DNA, 2 bp, Artificial Sequence
  Description of Artificial Sequence: Synthetic oligonucleotide
yg

SEQ ID NO: 13815 - DNA, 2 bp, Artificial Sequence
  Description of Artificial Sequence: Synthetic oligonucleotide
yg

SEQ ID NO: 13816 - DNA, 2 bp, Artificial Sequence
  Description of Artificial Sequence: Synthetic oligonucleotide
yg

SEQ ID NO: 13817 - DNA, 2 bp, Artificial Sequence
  Description of Artificial Sequence: Synthetic oligonucleotide
yg

SEQ ID NO: 13818 - DNA, 2 bp, Artificial Sequence
  Description of Artificial Sequence: Synthetic oligonucleotide
yg

SEQ ID NO: 13819 - DNA, 2 bp, Artificial Sequence
  Description of Artificial Sequence: Synthetic oligonucleotide
yg

SEQ ID NO: 13820 - DNA, 2 bp, Artificial Sequence
  Description of Artificial Sequence: Synthetic oligonucleotide
yg

SEQ ID NO: 13821 - DNA, 2 bp, Artificial Sequence
  Description of Artificial Sequence: Synthetic oligonucleotide
yg

SEQ ID NO: 13822 - DNA, 2 bp, Artificial Sequence
  Description of Artificial Sequence: Synthetic oligonucleotide
yg

SEQ ID NO: 13823 - DNA, 80 bp, Artificial Sequence
  Description of Artificial Sequence: Synthetic oligonucleotide
ygtagyggaaggtttggagtagaggttgttttttygtttaagtattttttgggtgagtttatatttttggygygagtayg

SEQ ID NO: 13824 - DNA, 2 bp, Artificial Sequence
  Description of Artificial Sequence: Synthetic oligonucleotide
yg

SEQ ID NO: 13825 - DNA, 2 bp, Artificial Sequence
  Description of Artificial Sequence: Synthetic oligonucleotide
yg

SEQ ID NO: 13826 - DNA, 2 bp, Artificial Sequence
  Description of Artificial Sequence: Synthetic oligonucleotide
yg

SEQ ID NO: 13827 - DNA, 2 bp, Artificial Sequence
  Description of Artificial Sequence: Synthetic oligonucleotide
yg

SEQ ID NO: 13828 - DNA, 2 bp, Artificial Sequence
  Description of Artificial Sequence: Synthetic oligonucleotide
yg

SEQ ID NO: 13829 - DNA, 2 bp, Artificial Sequence
  Description of Artificial Sequence: Synthetic oligonucleotide
yg

SEQ ID NO: 13830 - DNA, 2 bp, Artificial Sequence
  Description of Artificial Sequence: Synthetic oligonucleotide
yg

SEQ ID NO: 13831 - DNA, 2 bp, Artificial Sequence
  Description of Artificial Sequence: Synthetic oligonucleotide
yg

SEQ ID NO: 13832 - DNA, 2 bp, Artificial Sequence
  Description of Artificial Sequence: Synthetic oligonucleotide
yg

SEQ ID NO: 13833 - DNA, 2 bp, Artificial Sequence
  Description of Artificial Sequence: Synthetic oligonucleotide
yg

SEQ ID NO: 13834 - DNA, 4 bp, Artificial Sequence
  Description of Artificial Sequence: Synthetic oligonucleotide
ygyg

SEQ ID NO: 13835 - DNA, 2 bp, Artificial Sequence
  Description of Artificial Sequence: Synthetic oligonucleotide
yg

SEQ ID NO: 13836 - DNA, 2 bp, Artificial Sequence
  Description of Artificial Sequence: Synthetic oligonucleotide
yg

SEQ ID NO: 13837 - DNA, 2 bp, Artificial Sequence
  Description of Artificial Sequence: Synthetic oligonucleotide
yg

SEQ ID NO: 13838 - DNA, 2 bp, Artificial Sequence
  Description of Artificial Sequence: Synthetic oligonucleotide
yg

SEQ ID NO: 13839 - DNA, 2 bp, Artificial Sequence
  Description of Artificial Sequence: Synthetic oligonucleotide
yg

SEQ ID NO: 13840 - DNA, 2 bp, Artificial Sequence
  Description of Artificial Sequence: Synthetic oligonucleotide
yg

SEQ ID NO: 13841 - DNA, 2 bp, Artificial Sequence
  Description of Artificial Sequence: Synthetic oligonucleotide
yg

SEQ ID NO: 13842 - DNA, 2 bp, Artificial Sequence
  Description of Artificial Sequence: Synthetic oligonucleotide
yg

SEQ ID NO: 13843 - DNA, 2 bp, Artificial Sequence
  Description of Artificial Sequence: Synthetic oligonucleotide
yg

SEQ ID NO: 13844 - DNA, 2 bp, Artificial Sequence
  Description of Artificial Sequence: Synthetic oligonucleotide
yg

SEQ ID NO: 13845 - DNA, 3039 bp, Artificial Sequence
  Description of Artificial Sequence: Synthetic polynucleotide
ygtaygattttgggtgtaagttagagattttataaataygtygggttttgygtagyggttttygggaaggtattgttattygtgggagggttyggttygttattttttattttttgttgttttaaygttattttttaagtttggygtttttttttttttttttggaggttttygtgttgttttggggtgttttttgtgggygagatatataatttgggtgtaagttagggatttygygattatttttggttyggygtaggggtggttatttttgggaygatattatttygttatttttttttttggattgtttttattattttttttaattttggygttttgtattttttttttagtggtttttttgtygttttgtggtgtttttygtgggtgagataygtattyggggtgtaagatagggattttaggaygttttygggtttattgtagaggttgttgggaaggtagtgtygttygtgagaggattttagtattttygtttttttttttyggggttgttttaatttttttttttaagattgaygtgttgtttttttttttygggaatttttttgttgttttgtggtgttygtygtgggtaagatatttattttgggtgtaagttagggaattaataattttygtatgttyggtaaaggggttgtyggtaaggtattgttattygtgggattattttagtttygttgtttttttttttaggttatttaaaygtttttatttaagtttggygttttgttgttttttygygggggattttttgttattttggggtgtttttygtgggygagataygtatattgtgtgtaagatagggatttygygattttttygggattggtataggggttgtagggaaggtattgttattygtgaaaggattttagtttygttttttttttttttgggttgttttaaygtttttttttaagtttggtattttgttttttttttttyggggtttttttgttgttttggggtgttattygtgggygaggtaygtattttgggtgtaaattagggattttaagatttttagggttaggygtaggggatgtygggaagttattgtttttygtggaaagtttttttttggattgttttaaagtttttttttaagtttggtattttgtttttttttttyggagttttttttgtagttttygygtgtatatttaggygagataygtattttgttgtaagatagggattttaaattttttygtttgggttaggtttaggggttgtygggaaggtattgtggtttgtgggaygattatagtttagtygttgtttttttttggttggtttaaygtttttttttaagtttgatatgttgtttttttttttygggggttttgttgttatttttaygtgtatttygtgagtaagataggtattttgggtttaagttaggggttttatygtttatttgggttttatttagaggttgtygggaaggtattgtttttagtggaaatttttttttyggattgttttaaygtttttttttaagttyggygttttgtttttttttattyggggattttttatygtattgyggtgtttatygtgggtaygataygtatttygggtgtaagttagggattttataattattttaggttygatgtaggggttatyggataagatattgttgtttttgggatgatatyggtttgttttaattttattttttaattttggagttttgtattttttttttgggggtttttttgttgttttgtggtgttattygtgggygagatatataatttgggagtaagttagagattttaygatatttttgggtttattgtagaggttgttaggaaggyggtgttattygtgggaggattttagttttattatttttatttyggggtygttttaattttttttttaagtttgaygtgtttttttttttttygggaatttatttgtygttttggggtgtttttttgagygagataygtattttgggtgtaagttayggattttaggattattttggtttagygaaggggttgttaggaaggtattgtygtttgtgggagaaatttagygtygtygtttttttttaygggttattttaaagtttttttttaagtttgaggtgttgttttttttttttaggggtttatttgtygttttggggtgttttttatgggygaaataygtattttgggtgtaagatagggattttaygattttttygggtttagygtagggattgttaggaaggtattgttattygtaggaggaattygattagtygtttttttttttgtgttgttttagtatttttattaaagtttggttttttgtggygttygttyggyggtttttttgttattttggggtgtttttatgggtgygattygtattttyggtgtaagttagggattttaygattatttygggtttgaygtaggggttgttgggaaggtattgtygtttatgggaygattttagtttgttaygttttttttyggattgttttaattattttttttaattttggygttttatatttttttttyggtggtttttttgtygttttgtggtgtttttygagggygagataygtattttgggtgtaagttaaggattttatgaygtttttaggtttattatagatgttgtygggaagatagtgttattygtggtaggattttagtattttttttttattttyggggttgttttaaygtttttttttaagtttgaygtgttgttttttttttttgggaatttatttgtygttttggggtgtttttygtggaattttgggtgtaagtttgggatataataattttttygggtttggtaaaggggttgtygggaaggtatygtggttygtgggaagtttttttttggattgttttaaagtttttttttaagtttggygttttgttttttttttagggggtatttttgtygttttggggtgttttttygtgggygygataygtattttgggtttaagttaggaattttaygataatttygagtttggyg

SEQ ID NO: 13846 - DNA, 2 bp, Artificial Sequence
  Description of Artificial Sequence: Synthetic oligonucleotide
yg

SEQ ID NO: 13847 - DNA, 2 bp, Artificial Sequence
  Description of Artificial Sequence: Synthetic oligonucleotide
yg

SEQ ID NO: 13848 - DNA, 2 bp, Artificial Sequence
  Description of Artificial Sequence: Synthetic oligonucleotide
yg

SEQ ID NO: 13849 - DNA, 2 bp, Artificial Sequence
  Description of Artificial Sequence: Synthetic oligonucleotide
yg

SEQ ID NO: 13850 - DNA, 2 bp, Artificial Sequence
  Description of Artificial Sequence: Synthetic oligonucleotide
yg

SEQ ID NO: 13851 - DNA, 2 bp, Artificial Sequence
  Description of Artificial Sequence: Synthetic oligonucleotide
yg

SEQ ID NO: 13852 - DNA, 2 bp, Artificial Sequence
  Description of Artificial Sequence: Synthetic oligonucleotide
yg

SEQ ID NO: 13853 - DNA, 2 bp, Artificial Sequence
  Description of Artificial Sequence: Synthetic oligonucleotide
yg

SEQ ID NO: 13854 - DNA, 2 bp, Artificial Sequence
  Description of Artificial Sequence: Synthetic oligonucleotide
yg

SEQ ID NO: 13855 - DNA, 2 bp, Artificial Sequence
  Description of Artificial Sequence: Synthetic oligonucleotide
yg

SEQ ID NO: 13856 - DNA, 2 bp, Artificial Sequence
  Description of Artificial Sequence: Synthetic oligonucleotide
tg

SEQ ID NO: 13857 - DNA, 9 bp, Artificial Sequence
  Description of Artificial Sequence: Synthetic oligonucleotide
tgttatttg

SEQ ID NO: 13858 - DNA, 2 bp, Artificial Sequence
  Description of Artificial Sequence: Synthetic oligonucleotide
tg

SEQ ID NO: 13859 - DNA, 2 bp, Artificial Sequence
  Description of Artificial Sequence: Synthetic oligonucleotide
tg

SEQ ID NO: 13860 - DNA, 2 bp, Artificial Sequence
  Description of Artificial Sequence: Synthetic oligonucleotide
tg

SEQ ID NO: 13861 - DNA, 2 bp, Artificial Sequence
  Description of Artificial Sequence: Synthetic oligonucleotide
tg

SEQ ID NO: 13862 - DNA, 2 bp, Artificial Sequence
  Description of Artificial Sequence: Synthetic oligonucleotide
tg

SEQ ID NO: 13863 - DNA, 2 bp, Artificial Sequence
  Description of Artificial Sequence: Synthetic oligonucleotide
tg

SEQ ID NO: 13864 - DNA, 2 bp, Artificial Sequence
  Description of Artificial Sequence: Synthetic oligonucleotide
tg

SEQ ID NO: 13865 - DNA, 2 bp, Artificial Sequence
  Description of Artificial Sequence: Synthetic oligonucleotide
tg

SEQ ID NO: 13866 - DNA, 2 bp, Artificial Sequence
  Description of Artificial Sequence: Synthetic oligonucleotide
tg

SEQ ID NO: 13867 - DNA, 2 bp, Artificial Sequence
  Description of Artificial Sequence: Synthetic oligonucleotide
tg

SEQ ID NO: 13868 - DNA, 36 bp, Artificial Sequence
  Description of Artificial Sequence: Synthetic oligonucleotide
tgtaggttagtgggtgtgtgtattttgtgtgagttg

SEQ ID NO: 13869 - DNA, 2 bp, Artificial Sequence
  Description of Artificial Sequence: Synthetic oligonucleotide
tg

SEQ ID NO: 13870 - DNA, 2 bp, Artificial Sequence
  Description of Artificial Sequence: Synthetic oligonucleotide
tg

SEQ ID NO: 13871 - DNA, 2 bp, Artificial Sequence
  Description of Artificial Sequence: Synthetic oligonucleotide
tg

SEQ ID NO: 13872 - DNA, 2 bp, Artificial Sequence
  Description of Artificial Sequence: Synthetic oligonucleotide
tg

SEQ ID NO: 13873 - DNA, 2 bp, Artificial Sequence
  Description of Artificial Sequence: Synthetic oligonucleotide
tg

SEQ ID NO: 13874 - DNA, 2 bp, Artificial Sequence
  Description of Artificial Sequence: Synthetic oligonucleotide
tg

SEQ ID NO: 13875 - DNA, 2 bp, Artificial Sequence
  Description of Artificial Sequence: Synthetic oligonucleotide
tg

SEQ ID NO: 13876 - DNA, 2 bp, Artificial Sequence
  Description of Artificial Sequence: Synthetic oligonucleotide
tg

SEQ ID NO: 13877 - DNA, 2 bp, Artificial Sequence
  Description of Artificial Sequence: Synthetic oligonucleotide
tg

SEQ ID NO: 13878 - DNA, 2 bp, Artificial Sequence
  Description of Artificial Sequence: Synthetic oligonucleotide
tg

SEQ ID NO: 13879 - DNA, 8 bp, Artificial Sequence
  Description of Artificial Sequence: Synthetic oligonucleotide
tgttgttg

SEQ ID NO: 13880 - DNA, 2 bp, Artificial Sequence
  Description of Artificial Sequence: Synthetic oligonucleotide
tg

SEQ ID NO: 13881 - DNA, 2 bp, Artificial Sequence
  Description of Artificial Sequence: Synthetic oligonucleotide
tg

SEQ ID NO: 13882 - DNA, 2 bp, Artificial Sequence
  Description of Artificial Sequence: Synthetic oligonucleotide
tg

SEQ ID NO: 13883 - DNA, 2 bp, Artificial Sequence
  Description of Artificial Sequence: Synthetic oligonucleotide
tg

SEQ ID NO: 13884 - DNA, 2 bp, Artificial Sequence
  Description of Artificial Sequence: Synthetic oligonucleotide
tg

SEQ ID NO: 13885 - DNA, 2 bp, Artificial Sequence
  Description of Artificial Sequence: Synthetic oligonucleotide
tg

SEQ ID NO: 13886 - DNA, 2 bp, Artificial Sequence
  Description of Artificial Sequence: Synthetic oligonucleotide
tg

SEQ ID NO: 13887 - DNA, 2 bp, Artificial Sequence
  Description of Artificial Sequence: Synthetic oligonucleotide
tg

SEQ ID NO: 13888 - DNA, 2 bp, Artificial Sequence
  Description of Artificial Sequence: Synthetic oligonucleotide
tg

SEQ ID NO: 13889 - DNA, 2 bp, Artificial Sequence
  Description of Artificial Sequence: Synthetic oligonucleotide
tg

SEQ ID NO: 13890 - DNA, 181 bp, Artificial Sequence
  Description of Artificial Sequence: Synthetic polynucleotide
tgatttttttgttttagttttttgagtagttgggattataggtatatgttattatgtttagttaatttttgtttgtttgtttatttatttattattatttttgagatggagttttgttttgttattaggttggagtgttattggagtgtaatggtatgattttggtttattgtaatttttg

SEQ ID NO: 13891 - DNA, 2 bp, Artificial Sequence
  Description of Artificial Sequence: Synthetic oligonucleotide
tg

SEQ ID NO: 13892 - DNA, 2 bp, Artificial Sequence
  Description of Artificial Sequence: Synthetic oligonucleotide
tg

SEQ ID NO: 13893 - DNA, 2 bp, Artificial Sequence
  Description of Artificial Sequence: Synthetic oligonucleotide
tg

SEQ ID NO: 13894 - DNA, 2 bp, Artificial Sequence
  Description of Artificial Sequence: Synthetic oligonucleotide
tg

SEQ ID NO: 13895 - DNA, 2 bp, Artificial Sequence
  Description of Artificial Sequence: Synthetic oligonucleotide
tg

SEQ ID NO: 13896 - DNA, 2 bp, Artificial Sequence
  Description of Artificial Sequence: Synthetic oligonucleotide
tg

SEQ ID NO: 13897 - DNA, 2 bp, Artificial Sequence
  Description of Artificial Sequence: Synthetic oligonucleotide
tg

SEQ ID NO: 13898 - DNA, 2 bp, Artificial Sequence
  Description of Artificial Sequence: Synthetic oligonucleotide
tg

SEQ ID NO: 13899 - DNA, 2 bp, Artificial Sequence
  Description of Artificial Sequence: Synthetic oligonucleotide
tg

SEQ ID NO: 13900 - DNA, 2 bp, Artificial Sequence
  Description of Artificial Sequence: Synthetic oligonucleotide
tg

SEQ ID NO: 13901 - DNA, 369 bp, Artificial Sequence
  Description of Artificial Sequence: Synthetic polynucleotide
tggggaggtttgggttgtataggagtgtatggtgggggtggaggtttaggtatggagggttgtaggttttgagttttgtttggtggggaggtagttaaggtttagtgagaagttgagtatagtagttgttggtttaggtgttaagttttttattgtttgggttggttggttgttttgagtgtggggtttgttaagtttatgtttatttggaatttgagttggtttgtaagtgtagtttgtagttatggtttttgtttatgtttttttttttatatttatttgtaagttgagggagttggttttagttttgtttagtttagaaaggggtttttatagtgtagtgatgggttgaagggttttttaaatgtg

SEQ ID NO: 13902 - DNA, 2 bp, Artificial Sequence
  Description of Artificial Sequence: Synthetic oligonucleotide
tg

SEQ ID NO: 13903 - DNA, 2 bp, Artificial Sequence
  Description of Artificial Sequence: Synthetic oligonucleotide
tg

SEQ ID NO: 13904 - DNA, 2 bp, Artificial Sequence
  Description of Artificial Sequence: Synthetic oligonucleotide
tg

SEQ ID NO: 13905 - DNA, 2 bp, Artificial Sequence
  Description of Artificial Sequence: Synthetic oligonucleotide
tg

SEQ ID NO: 13906 - DNA, 2 bp, Artificial Sequence
  Description of Artificial Sequence: Synthetic oligonucleotide
tg

SEQ ID NO: 13907 - DNA, 2 bp, Artificial Sequence
  Description of Artificial Sequence: Synthetic oligonucleotide
tg

SEQ ID NO: 13908 - DNA, 2 bp, Artificial Sequence
  Description of Artificial Sequence: Synthetic oligonucleotide
tg

SEQ ID NO: 13909 - DNA, 2 bp, Artificial Sequence
  Description of Artificial Sequence: Synthetic oligonucleotide
tg

SEQ ID NO: 13910 - DNA, 2 bp, Artificial Sequence
  Description of Artificial Sequence: Synthetic oligonucleotide
tg

SEQ ID NO: 13911 - DNA, 2 bp, Artificial Sequence
  Description of Artificial Sequence: Synthetic oligonucleotide
tg

SEQ ID NO: 13912 - DNA, 2 bp, Artificial Sequence
  Description of Artificial Sequence: Synthetic oligonucleotide
tg

SEQ ID NO: 13913 - DNA, 2 bp, Artificial Sequence
  Description of Artificial Sequence: Synthetic oligonucleotide
tg

SEQ ID NO: 13914 - DNA, 2 bp, Artificial Sequence
  Description of Artificial Sequence: Synthetic oligonucleotide
tg

SEQ ID NO: 13915 - DNA, 2 bp, Artificial Sequence
  Description of Artificial Sequence: Synthetic oligonucleotide
tg

SEQ ID NO: 13916 - DNA, 2 bp, Artificial Sequence
  Description of Artificial Sequence: Synthetic oligonucleotide
tg

SEQ ID NO: 13917 - DNA, 2 bp, Artificial Sequence
  Description of Artificial Sequence: Synthetic oligonucleotide
tg

SEQ ID NO: 13918 - DNA, 2 bp, Artificial Sequence
  Description of Artificial Sequence: Synthetic oligonucleotide
tg

SEQ ID NO: 13919 - DNA, 2 bp, Artificial Sequence
  Description of Artificial Sequence: Synthetic oligonucleotide
tg

SEQ ID NO: 13920 - DNA, 2 bp, Artificial Sequence
  Description of Artificial Sequence: Synthetic oligonucleotide
tg

SEQ ID NO: 13921 - DNA, 2 bp, Artificial Sequence
  Description of Artificial Sequence: Synthetic oligonucleotide
tg

SEQ ID NO: 13922 - DNA, 2 bp, Artificial Sequence
  Description of Artificial Sequence: Synthetic oligonucleotide
tg

SEQ ID NO: 13923 - DNA, 35 bp, Artificial Sequence
  Description of Artificial Sequence: Synthetic oligonucleotide
tggtagtaaatgaagttgaggtagtggtgtaagtg

SEQ ID NO: 13924 - DNA, 2 bp, Artificial Sequence
  Description of Artificial Sequence: Synthetic oligonucleotide
tg

SEQ ID NO: 13925 - DNA, 2 bp, Artificial Sequence
  Description of Artificial Sequence: Synthetic oligonucleotide
tg

SEQ ID NO: 13926 - DNA, 2 bp, Artificial Sequence
  Description of Artificial Sequence: Synthetic oligonucleotide
tg

SEQ ID NO: 13927 - DNA, 2 bp, Artificial Sequence
  Description of Artificial Sequence: Synthetic oligonucleotide
tg

SEQ ID NO: 13928 - DNA, 2 bp, Artificial Sequence
  Description of Artificial Sequence: Synthetic oligonucleotide
tg

SEQ ID NO: 13929 - DNA, 2 bp, Artificial Sequence
  Description of Artificial Sequence: Synthetic oligonucleotide
tg

SEQ ID NO: 13930 - DNA, 2 bp, Artificial Sequence
  Description of Artificial Sequence: Synthetic oligonucleotide
tg

SEQ ID NO: 13931 - DNA, 2 bp, Artificial Sequence
  Description of Artificial Sequence: Synthetic oligonucleotide
tg

SEQ ID NO: 13932 - DNA, 2 bp, Artificial Sequence
  Description of Artificial Sequence: Synthetic oligonucleotide
tg

SEQ ID NO: 13933 - DNA, 2 bp, Artificial Sequence
  Description of Artificial Sequence: Synthetic oligonucleotide
tg

SEQ ID NO: 13934 - DNA, 487 bp, Artificial Sequence
  Description of Artificial Sequence: Synthetic polynucleotide
tgttttttgtttgttttaaagggtaaggtttttttgttttgtgttttgtttttgttttatttaggttttgttattatgtttgggggttttatttgggattggtttttgttttgtgtagtaaatttggaagtggattatgtggagtaaaggttttattgaggtgtgtgagttttgttttgttttgtattaagtttgtattttttaggtttttggtatttttgtttttgggatgtggggtttttatagatttggaaatttttgtttgtttttttttatttagagtaaattgagatgtttataagagtttggaagttgtttttttttgggtttgaagttgtttggaggttggttttgtttttggtttttttgttatagggtaatgtatatattttttattgtatagtttttttgtttaaaattttgttgatttattttgttttttgttttttaaagtttttatttgtgtgttggatttttgttttgggtg

SEQ ID NO: 13935 - DNA, 2 bp, Artificial Sequence
  Description of Artificial Sequence: Synthetic oligonucleotide
tg

SEQ ID NO: 13936 - DNA, 2 bp, Artificial Sequence
  Description of Artificial Sequence: Synthetic oligonucleotide
tg

SEQ ID NO: 13937 - DNA, 2 bp, Artificial Sequence
  Description of Artificial Sequence: Synthetic oligonucleotide
tg

SEQ ID NO: 13938 - DNA, 2 bp, Artificial Sequence
  Description of Artificial Sequence: Synthetic oligonucleotide
tg

SEQ ID NO: 13939 - DNA, 2 bp, Artificial Sequence
  Description of Artificial Sequence: Synthetic oligonucleotide
tg

SEQ ID NO: 13940 - DNA, 2 bp, Artificial Sequence
  Description of Artificial Sequence: Synthetic oligonucleotide
tg

SEQ ID NO: 13941 - DNA, 2 bp, Artificial Sequence
  Description of Artificial Sequence: Synthetic oligonucleotide
tg

SEQ ID NO: 13942 - DNA, 2 bp, Artificial Sequence
  Description of Artificial Sequence: Synthetic oligonucleotide
tg

SEQ ID NO: 13943 - DNA, 2 bp, Artificial Sequence
  Description of Artificial Sequence: Synthetic oligonucleotide
tg

SEQ ID NO: 13944 - DNA, 2 bp, Artificial Sequence
  Description of Artificial Sequence: Synthetic oligonucleotide
tg

SEQ ID NO: 13945 - DNA, 28 bp, Artificial Sequence
  Description of Artificial Sequence: Synthetic oligonucleotide
tggattatgaggttaggagattaagatg

SEQ ID NO: 13946 - DNA, 2 bp, Artificial Sequence
  Description of Artificial Sequence: Synthetic oligonucleotide
tg

SEQ ID NO: 13947 - DNA, 2 bp, Artificial Sequence
  Description of Artificial Sequence: Synthetic oligonucleotide
tg

SEQ ID NO: 13948 - DNA, 2 bp, Artificial Sequence
  Description of Artificial Sequence: Synthetic oligonucleotide
tg

SEQ ID NO: 13949 - DNA, 2 bp, Artificial Sequence
  Description of Artificial Sequence: Synthetic oligonucleotide
tg

SEQ ID NO: 13950 - DNA, 2 bp, Artificial Sequence
  Description of Artificial Sequence: Synthetic oligonucleotide
tg

SEQ ID NO: 13951 - DNA, 2 bp, Artificial Sequence
  Description of Artificial Sequence: Synthetic oligonucleotide
tg

SEQ ID NO: 13952 - DNA, 2 bp, Artificial Sequence
  Description of Artificial Sequence: Synthetic oligonucleotide
tg

SEQ ID NO: 13953 - DNA, 2 bp, Artificial Sequence
  Description of Artificial Sequence: Synthetic oligonucleotide
tg

SEQ ID NO: 13954 - DNA, 2 bp, Artificial Sequence
  Description of Artificial Sequence: Synthetic oligonucleotide
tg

SEQ ID NO: 13955 - DNA, 2 bp, Artificial Sequence
  Description of Artificial Sequence: Synthetic oligonucleotide
tg

SEQ ID NO: 13956 - DNA, 2 bp, Artificial Sequence
  Description of Artificial Sequence: Synthetic oligonucleotide
tg

SEQ ID NO: 13957 - DNA, 2 bp, Artificial Sequence
  Description of Artificial Sequence: Synthetic oligonucleotide
tg

SEQ ID NO: 13958 - DNA, 2 bp, Artificial Sequence
  Description of Artificial Sequence: Synthetic oligonucleotide
tg

SEQ ID NO: 13959 - DNA, 2 bp, Artificial Sequence
  Description of Artificial Sequence: Synthetic oligonucleotide
tg

SEQ ID NO: 13960 - DNA, 2 bp, Artificial Sequence
  Description of Artificial Sequence: Synthetic oligonucleotide
tg

SEQ ID NO: 13961 - DNA, 2 bp, Artificial Sequence
  Description of Artificial Sequence: Synthetic oligonucleotide
tg

SEQ ID NO: 13962 - DNA, 2 bp, Artificial Sequence
  Description of Artificial Sequence: Synthetic oligonucleotide
tg

SEQ ID NO: 13963 - DNA, 2 bp, Artificial Sequence
  Description of Artificial Sequence: Synthetic oligonucleotide
tg

SEQ ID NO: 13964 - DNA, 2 bp, Artificial Sequence
  Description of Artificial Sequence: Synthetic oligonucleotide
tg

SEQ ID NO: 13965 - DNA, 2 bp, Artificial Sequence
  Description of Artificial Sequence: Synthetic oligonucleotide
tg

SEQ ID NO: 13966 - DNA, 2 bp, Artificial Sequence
  Description of Artificial Sequence: Synthetic oligonucleotide
tg

SEQ ID NO: 13967 - DNA, 18 bp, Artificial Sequence
  Description of Artificial Sequence: Synthetic oligonucleotide
tgtggttaggaaggtgtg

SEQ ID NO: 13968 - DNA, 18 bp, Artificial Sequence
  Description of Artificial Sequence: Synthetic oligonucleotide
tgtatttattgatttgtg

SEQ ID NO: 13969 - DNA, 2 bp, Artificial Sequence
  Description of Artificial Sequence: Synthetic oligonucleotide
tg

SEQ ID NO: 13970 - DNA, 2 bp, Artificial Sequence
  Description of Artificial Sequence: Synthetic oligonucleotide
tg

SEQ ID NO: 13971 - DNA, 2 bp, Artificial Sequence
  Description of Artificial Sequence: Synthetic oligonucleotide
tg

SEQ ID NO: 13972 - DNA, 2 bp, Artificial Sequence
  Description of Artificial Sequence: Synthetic oligonucleotide
tg

SEQ ID NO: 13973 - DNA, 2 bp, Artificial Sequence
  Description of Artificial Sequence: Synthetic oligonucleotide
tg

SEQ ID NO: 13974 - DNA, 2 bp, Artificial Sequence
  Description of Artificial Sequence: Synthetic oligonucleotide
tg

SEQ ID NO: 13975 - DNA, 2 bp, Artificial Sequence
  Description of Artificial Sequence: Synthetic oligonucleotide
tg

SEQ ID NO: 13976 - DNA, 2 bp, Artificial Sequence
  Description of Artificial Sequence: Synthetic oligonucleotide
tg

SEQ ID NO: 13977 - DNA, 2 bp, Artificial Sequence
  Description of Artificial Sequence: Synthetic oligonucleotide
tg

SEQ ID NO: 13978 - DNA, 2 bp, Artificial Sequence
  Description of Artificial Sequence: Synthetic oligonucleotide
tg

SEQ ID NO: 13979 - DNA, 87 bp, Artificial Sequence
  Description of Artificial Sequence: Synthetic oligonucleotide
tgttatttatttatttgatttggaaagggaattttttgattttttgtgttttttaggtgaggtaatgttttgttttgttttggtttg

SEQ ID NO: 13980 - DNA, 2 bp, Artificial Sequence
  Description of Artificial Sequence: Synthetic oligonucleotide
tg

SEQ ID NO: 13981 - DNA, 2 bp, Artificial Sequence
  Description of Artificial Sequence: Synthetic oligonucleotide
tg

SEQ ID NO: 13982 - DNA, 2 bp, Artificial Sequence
  Description of Artificial Sequence: Synthetic oligonucleotide
tg

SEQ ID NO: 13983 - DNA, 2 bp, Artificial Sequence
  Description of Artificial Sequence: Synthetic oligonucleotide
tg

SEQ ID NO: 13984 - DNA, 2 bp, Artificial Sequence
  Description of Artificial Sequence: Synthetic oligonucleotide
tg

SEQ ID NO: 13985 - DNA, 2 bp, Artificial Sequence
  Description of Artificial Sequence: Synthetic oligonucleotide
tg

SEQ ID NO: 13986 - DNA, 2 bp, Artificial Sequence
  Description of Artificial Sequence: Synthetic oligonucleotide
tg

SEQ ID NO: 13987 - DNA, 2 bp, Artificial Sequence
  Description of Artificial Sequence: Synthetic oligonucleotide
tg

SEQ ID NO: 13988 - DNA, 2 bp, Artificial Sequence
  Description of Artificial Sequence: Synthetic oligonucleotide
tg

SEQ ID NO: 13989 - DNA, 2 bp, Artificial Sequence
  Description of Artificial Sequence: Synthetic oligonucleotide
tg

SEQ ID NO: 13990 - DNA, 11 bp, Artificial Sequence
  Description of Artificial Sequence: Synthetic oligonucleotide
tgtaagttttg

SEQ ID NO: 13991 - DNA, 2 bp, Artificial Sequence
  Description of Artificial Sequence: Synthetic oligonucleotide
tg

SEQ ID NO: 13992 - DNA, 2 bp, Artificial Sequence
  Description of Artificial Sequence: Synthetic oligonucleotide
tg

SEQ ID NO: 13993 - DNA, 2 bp, Artificial Sequence
  Description of Artificial Sequence: Synthetic oligonucleotide
tg

SEQ ID NO: 13994 - DNA, 2 bp, Artificial Sequence
  Description of Artificial Sequence: Synthetic oligonucleotide
tg

SEQ ID NO: 13995 - DNA, 2 bp, Artificial Sequence
  Description of Artificial Sequence: Synthetic oligonucleotide
tg

SEQ ID NO: 13996 - DNA, 2 bp, Artificial Sequence
  Description of Artificial Sequence: Synthetic oligonucleotide
tg

SEQ ID NO: 13997 - DNA, 2 bp, Artificial Sequence
  Description of Artificial Sequence: Synthetic oligonucleotide
tg

SEQ ID NO: 13998 - DNA, 2 bp, Artificial Sequence
  Description of Artificial Sequence: Synthetic oligonucleotide
tg

SEQ ID NO: 13999 - DNA, 2 bp, Artificial Sequence
  Description of Artificial Sequence: Synthetic oligonucleotide
tg

SEQ ID NO: 14000 - DNA, 2 bp, Artificial Sequence
  Description of Artificial Sequence: Synthetic oligonucleotide
tg

SEQ ID NO: 14001 - DNA, 2 bp, Artificial Sequence
  Description of Artificial Sequence: Synthetic oligonucleotide
tg

SEQ ID NO: 14002 - DNA, 2 bp, Artificial Sequence
  Description of Artificial Sequence: Synthetic oligonucleotide
tg

SEQ ID NO: 14003 - DNA, 2 bp, Artificial Sequence
  Description of Artificial Sequence: Synthetic oligonucleotide
tg

SEQ ID NO: 14004 - DNA, 2 bp, Artificial Sequence
  Description of Artificial Sequence: Synthetic oligonucleotide
tg

SEQ ID NO: 14005 - DNA, 2 bp, Artificial Sequence
  Description of Artificial Sequence: Synthetic oligonucleotide
tg

SEQ ID NO: 14006 - DNA, 2 bp, Artificial Sequence
  Description of Artificial Sequence: Synthetic oligonucleotide
tg

SEQ ID NO: 14007 - DNA, 2 bp, Artificial Sequence
  Description of Artificial Sequence: Synthetic oligonucleotide
tg

SEQ ID NO: 14008 - DNA, 2 bp, Artificial Sequence
  Description of Artificial Sequence: Synthetic oligonucleotide
tg

SEQ ID NO: 14009 - DNA, 2 bp, Artificial Sequence
  Description of Artificial Sequence: Synthetic oligonucleotide
tg

SEQ ID NO: 14010 - DNA, 167 bp, Artificial Sequence
  Description of Artificial Sequence: Synthetic polynucleotide
tgttattttttaagttggtttgaaaagtgtaatatttgggtgggagtgatttgattttttaggtgtgttggttatttttttttttgatttggaaagggaattttttgatttttggtgttttttaggtgaggtaatgttttgttttgttttggtttgtttatggtgtg

SEQ ID NO: 14011 - DNA, 2 bp, Artificial Sequence
  Description of Artificial Sequence: Synthetic oligonucleotide
tg

SEQ ID NO: 14012 - DNA, 2 bp, Artificial Sequence
  Description of Artificial Sequence: Synthetic oligonucleotide
tg

SEQ ID NO: 14013 - DNA, 2 bp, Artificial Sequence
  Description of Artificial Sequence: Synthetic oligonucleotide
tg

SEQ ID NO: 14014 - DNA, 185 bp, Artificial Sequence
  Description of Artificial Sequence: Synthetic polynucleotide
tggtgtttatatatgttgtttttaaaaaaatttgttttgtttaggtttgtgtgaatataatgttggatgaattttgtttttttagaagaaagttgggttggtgtgtttgatgatgtagtgtttgtagtggtgtttgataaagtgtagggtttttatggagattttgtagttttggatatttagtg

SEQ ID NO: 14015 - DNA, 17 bp, Artificial Sequence
  Description of Artificial Sequence: Synthetic oligonucleotide
tgttttgttttggtttg

SEQ ID NO: 14016 - DNA, 135 bp, Artificial Sequence
  Description of Artificial Sequence: Synthetic polynucleotide
tgtaatatttgggtgggagtgatttgattttttaggtgtgtttgttatttttttttttgattaggaaagggaattttttgatttttggtgttttttgagtgaggtattgttttattttgttttggtttgtgtatg

SEQ ID NO: 14017 - DNA, 2 bp, Artificial Sequence
  Description of Artificial Sequence: Synthetic oligonucleotide
tg

SEQ ID NO: 14018 - DNA, 71 bp, Artificial Sequence
  Description of Artificial Sequence: Synthetic oligonucleotide
tggtgggttgaagggttttttaagtgtggttagagtgggtgttaaggttgaggaggtgttaagagtgagtg

SEQ ID NO: 14019 - DNA, 54 bp, Artificial Sequence
  Description of Artificial Sequence: Synthetic oligonucleotide
tgttttttaagtgaggtaatgttttgttttgttttggtttgtgtatggtgtgtg

SEQ ID NO: 14020 - DNA, 5 bp, Artificial Sequence
  Description of Artificial Sequence: Synthetic oligonucleotide
tgttg

SEQ ID NO: 14021 - DNA, 29 bp, Artificial Sequence
  Description of Artificial Sequence: Synthetic oligonucleotide
tgttttttttatgggtttaaaaattggtg

SEQ ID NO: 14022 - DNA, 18 bp, Artificial Sequence
  Description of Artificial Sequence: Synthetic oligonucleotide
tgtagatattagaaagtg

SEQ ID NO: 14023 - DNA, 2 bp, Artificial Sequence
  Description of Artificial Sequence: Synthetic oligonucleotide
tg

SEQ ID NO: 14024 - DNA, 5 bp, Artificial Sequence
  Description of Artificial Sequence: Synthetic oligonucleotide
tgttg

SEQ ID NO: 14025 - DNA, 24 bp, Artificial Sequence
  Description of Artificial Sequence: Synthetic oligonucleotide
tgagtttgtgtaggaggtgttttg

SEQ ID NO: 14026 - DNA, 2 bp, Artificial Sequence
  Description of Artificial Sequence: Synthetic oligonucleotide
tg

SEQ ID NO: 14027 - DNA, 4 bp, Artificial Sequence
  Description of Artificial Sequence: Synthetic oligonucleotide
tgtg

SEQ ID NO: 14028 - DNA, 2 bp, Artificial Sequence
  Description of Artificial Sequence: Synthetic oligonucleotide
tg

SEQ ID NO: 14029 - DNA, 2 bp, Artificial Sequence
  Description of Artificial Sequence: Synthetic oligonucleotide
tg

SEQ ID NO: 14030 - DNA, 2 bp, Artificial Sequence
  Description of Artificial Sequence: Synthetic oligonucleotide
tg

SEQ ID NO: 14031 - DNA, 2 bp, Artificial Sequence
  Description of Artificial Sequence: Synthetic oligonucleotide
tg

SEQ ID NO: 14032 - DNA, 2 bp, Artificial Sequence
  Description of Artificial Sequence: Synthetic oligonucleotide
tg

SEQ ID NO: 14033 - DNA, 2 bp, Artificial Sequence
  Description of Artificial Sequence: Synthetic oligonucleotide
tg

SEQ ID NO: 14034 - DNA, 2 bp, Artificial Sequence
  Description of Artificial Sequence: Synthetic oligonucleotide
tg

SEQ ID NO: 14035 - DNA, 2 bp, Artificial Sequence
  Description of Artificial Sequence: Synthetic oligonucleotide
tg

SEQ ID NO: 14036 - DNA, 2 bp, Artificial Sequence
  Description of Artificial Sequence: Synthetic oligonucleotide
tg

SEQ ID NO: 14037 - DNA, 2 bp, Artificial Sequence
  Description of Artificial Sequence: Synthetic oligonucleotide
tg

SEQ ID NO: 14038 - DNA, 12 bp, Artificial Sequence
  Description of Artificial Sequence: Synthetic oligonucleotide
tgatttgttttg

SEQ ID NO: 14039 - DNA, 2 bp, Artificial Sequence
  Description of Artificial Sequence: Synthetic oligonucleotide
tg

SEQ ID NO: 14040 - DNA, 2 bp, Artificial Sequence
  Description of Artificial Sequence: Synthetic oligonucleotide
tg

SEQ ID NO: 14041 - DNA, 2 bp, Artificial Sequence
  Description of Artificial Sequence: Synthetic oligonucleotide
tg

SEQ ID NO: 14042 - DNA, 2 bp, Artificial Sequence
  Description of Artificial Sequence: Synthetic oligonucleotide
tg

SEQ ID NO: 14043 - DNA, 2 bp, Artificial Sequence
  Description of Artificial Sequence: Synthetic oligonucleotide
tg

SEQ ID NO: 14044 - DNA, 2 bp, Artificial Sequence
  Description of Artificial Sequence: Synthetic oligonucleotide
tg

SEQ ID NO: 14045 - DNA, 2 bp, Artificial Sequence
  Description of Artificial Sequence: Synthetic oligonucleotide
tg

SEQ ID NO: 14046 - DNA, 2 bp, Artificial Sequence
  Description of Artificial Sequence: Synthetic oligonucleotide
tg

SEQ ID NO: 14047 - DNA, 2 bp, Artificial Sequence
  Description of Artificial Sequence: Synthetic oligonucleotide
tg

SEQ ID NO: 14048 - DNA, 2 bp, Artificial Sequence
  Description of Artificial Sequence: Synthetic oligonucleotide
tg

SEQ ID NO: 14049 - DNA, 2 bp, Artificial Sequence
  Description of Artificial Sequence: Synthetic oligonucleotide
tg

SEQ ID NO: 14050 - DNA, 2 bp, Artificial Sequence
  Description of Artificial Sequence: Synthetic oligonucleotide
tg

SEQ ID NO: 14051 - DNA, 2 bp, Artificial Sequence
  Description of Artificial Sequence: Synthetic oligonucleotide
tg

SEQ ID NO: 14052 - DNA, 2 bp, Artificial Sequence
  Description of Artificial Sequence: Synthetic oligonucleotide
tg

SEQ ID NO: 14053 - DNA, 2 bp, Artificial Sequence
  Description of Artificial Sequence: Synthetic oligonucleotide
tg

SEQ ID NO: 14054 - DNA, 2 bp, Artificial Sequence
  Description of Artificial Sequence: Synthetic oligonucleotide
tg

SEQ ID NO: 14055 - DNA, 2 bp, Artificial Sequence
  Description of Artificial Sequence: Synthetic oligonucleotide
tg

SEQ ID NO: 14056 - DNA, 2 bp, Artificial Sequence
  Description of Artificial Sequence: Synthetic oligonucleotide
tg

SEQ ID NO: 14057 - DNA, 2 bp, Artificial Sequence
  Description of Artificial Sequence: Synthetic oligonucleotide
tg

SEQ ID NO: 14058 - DNA, 2 bp, Artificial Sequence
  Description of Artificial Sequence: Synthetic oligonucleotide
tg

SEQ ID NO: 14059 - DNA, 2 bp, Artificial Sequence
  Description of Artificial Sequence: Synthetic oligonucleotide
tg

SEQ ID NO: 14060 - DNA, 80 bp, Artificial Sequence
  Description of Artificial Sequence: Synthetic oligonucleotide
tgtagtggaaggtttggagtagaggttgtttttttgtttaagtattttttgggtgagtttatatttttggtgtgagtatg

SEQ ID NO: 14061 - DNA, 2 bp, Artificial Sequence
  Description of Artificial Sequence: Synthetic oligonucleotide
tg

SEQ ID NO: 14062 - DNA, 2 bp, Artificial Sequence
  Description of Artificial Sequence: Synthetic oligonucleotide
tg

SEQ ID NO: 14063 - DNA, 2 bp, Artificial Sequence
  Description of Artificial Sequence: Synthetic oligonucleotide
tg

SEQ ID NO: 14064 - DNA, 2 bp, Artificial Sequence
  Description of Artificial Sequence: Synthetic oligonucleotide
tg

SEQ ID NO: 14065 - DNA, 2 bp, Artificial Sequence
  Description of Artificial Sequence: Synthetic oligonucleotide
tg

SEQ ID NO: 14066 - DNA, 2 bp, Artificial Sequence
  Description of Artificial Sequence: Synthetic oligonucleotide
tg

SEQ ID NO: 14067 - DNA, 2 bp, Artificial Sequence
  Description of Artificial Sequence: Synthetic oligonucleotide
tg

SEQ ID NO: 14068 - DNA, 2 bp, Artificial Sequence
  Description of Artificial Sequence: Synthetic oligonucleotide
tg

SEQ ID NO: 14069 - DNA, 2 bp, Artificial Sequence
  Description of Artificial Sequence: Synthetic oligonucleotide
tg

SEQ ID NO: 14070 - DNA, 2 bp, Artificial Sequence
  Description of Artificial Sequence: Synthetic oligonucleotide
tg

SEQ ID NO: 14071 - DNA, 4 bp, Artificial Sequence
  Description of Artificial Sequence: Synthetic oligonucleotide
tgtg

SEQ ID NO: 14072 - DNA, 2 bp, Artificial Sequence
  Description of Artificial Sequence: Synthetic oligonucleotide
tg

SEQ ID NO: 14073 - DNA, 2 bp, Artificial Sequence
  Description of Artificial Sequence: Synthetic oligonucleotide
tg

SEQ ID NO: 14074 - DNA, 2 bp, Artificial Sequence
  Description of Artificial Sequence: Synthetic oligonucleotide
tg

SEQ ID NO: 14075 - DNA, 2 bp, Artificial Sequence
  Description of Artificial Sequence: Synthetic oligonucleotide
tg

SEQ ID NO: 14076 - DNA, 2 bp, Artificial Sequence
  Description of Artificial Sequence: Synthetic oligonucleotide
tg

SEQ ID NO: 14077 - DNA, 2 bp, Artificial Sequence
  Description of Artificial Sequence: Synthetic oligonucleotide
tg

SEQ ID NO: 14078 - DNA, 2 bp, Artificial Sequence
  Description of Artificial Sequence: Synthetic oligonucleotide
tg

SEQ ID NO: 14079 - DNA, 2 bp, Artificial Sequence
  Description of Artificial Sequence: Synthetic oligonucleotide
tg

SEQ ID NO: 14080 - DNA, 2 bp, Artificial Sequence
  Description of Artificial Sequence: Synthetic oligonucleotide
tg

SEQ ID NO: 14081 - DNA, 2 bp, Artificial Sequence
  Description of Artificial Sequence: Synthetic oligonucleotide
tg

SEQ ID NO: 14082 - DNA, 3039 bp, Artificial Sequence
  Description of Artificial Sequence: Synthetic polynucleotide
tgtatgattttgggtgtaagttagagattttataaatatgttgggttttgtgtagtggtttttgggaaggtattgttatttgtgggagggtttggtttgttattttttattttttgttgttttaatgttattttttaagtttggtgtttttttttttttttttggaggtttttgtgttgttttggggtgttttttgtgggtgagatatataatttgggtgtaagttagggattttgtgattatttttggtttggtgtaggggtggttatttttgggatgatattattttgttatttttttttttggattgtttttattattttttttaattttggtgttttgtattttttttttagtggtttttttgttgttttgtggtgttttttgtgggtgagatatgtatttggggtgtaagatagggattttaggatgtttttgggtttattgtagaggttgttgggaaggtagtgttgtttgtgagaggattttagtatttttgttttttttttttggggttgttttaatttttttttttaagattgatgtgttgttttttttttttgggaatttttttgttgttttgtggtgtttgttgtgggtaagatatttattttgggtgtaagttagggaattaataatttttgtatgtttggtaaaggggttgttggtaaggtattgttatttgtgggattattttagttttgttgtttttttttttaggttatttaaatgtttttatttaagtttggtgttttgttgtttttttgtgggggattttttgttattttggggtgttttttgtgggtgagatatgtatattgtgtgtaagatagggattttgtgatttttttgggattggtataggggttgtagggaaggtattgttatttgtgaaaggattttagttttgttttttttttttttgggttgttttaatgtttttttttaagtttggtattttgtttttttttttttggggtttttttgttgttttggggtgttatttgtgggtgaggtatgtattttgggtgtaaattagggattttaagatttttagggttaggtgtaggggatgttgggaagttattgttttttgtggaaagtttttttttggattgttttaaagtttttttttaagtttggtattttgttttttttttttggagttttttttgtagtttttgtgtgtatatttaggtgagatatgtattttgttgtaagatagggattttaaatttttttgtttgggttaggtttaggggttgttgggaaggtattgtggtttgtgggatgattatagtttagttgttgtttttttttggttggtttaatgtttttttttaagtttgatatgttgttttttttttttgggggttttgttgttatttttatgtgtattttgtgagtaagataggtattttgggtttaagttaggggttttattgtttatttgggttttatttagaggttgttgggaaggtattgtttttagtggaaattttttttttggattgttttaatgtttttttttaagtttggtgttttgtttttttttatttggggattttttattgtattgtggtgtttattgtgggtatgatatgtattttgggtgtaagttagggattttataattattttaggtttgatgtaggggttattggataagatattgttgtttttgggatgatattggtttgttttaattttattttttaattttggagttttgtattttttttttgggggtttttttgttgttttgtggtgttatttgtgggtgagatatataatttgggagtaagttagagattttatgatatttttgggtttattgtagaggttgttaggaaggtggtgttatttgtgggaggattttagttttattatttttattttggggttgttttaattttttttttaagtttgatgtgttttttttttttttgggaatttatttgttgttttggggtgtttttttgagtgagatatgtattttgggtgtaagttatggattttaggattattttggtttagtgaaggggttgttaggaaggtattgttgtttgtgggagaaatttagtgttgttgtttttttttatgggttattttaaagtttttttttaagtttgaggtgttgttttttttttttaggggtttatttgttgttttggggtgttttttatgggtgaaatatgtattttgggtgtaagatagggattttatgatttttttgggtttagtgtagggattgttaggaaggtattgttatttgtaggaggaatttgattagttgtttttttttttgtgttgttttagtatttttattaaagtttggttttttgtggtgtttgtttggtggtttttttgttattttggggtgtttttatgggtgtgatttgtatttttggtgtaagttagggattttatgattattttgggtttgatgtaggggttgttgggaaggtattgttgtttatgggatgattttagtttgttatgtttttttttggattgttttaattattttttttaattttggtgttttatattttttttttggtggtttttttgttgttttgtggtgttttttgagggtgagatatgtattttgggtgtaagttaaggattttatgatgtttttaggtttattatagatgttgttgggaagatagtgttatttgtggtaggattttagtattttttttttatttttggggttgttttaatgtttttttttaagtttgatgtgttgttttttttttttgggaatttatttgttgttttggggtgttttttgtggaattttgggtgtaagtttgggatataataatttttttgggtttggtaaaggggttgttgggaaggtattgtggtttgtgggaagtttttttttggattgttttaaagtttttttttaagtttggtgttttgttttttttttagggggtatttttgttgttttggggtgtttttttgtgggtgtgatatgtattttgggtttaagttaggaattttatgataattttgagtttggtg

SEQ ID NO: 14083 - DNA, 2 bp, Artificial Sequence
  Description of Artificial Sequence: Synthetic oligonucleotide
tg

SEQ ID NO: 14084 - DNA, 2 bp, Artificial Sequence
  Description of Artificial Sequence: Synthetic oligonucleotide
tg

SEQ ID NO: 14085 - DNA, 2 bp, Artificial Sequence
  Description of Artificial Sequence: Synthetic oligonucleotide
tg

SEQ ID NO: 14086 - DNA, 2 bp, Artificial Sequence
  Description of Artificial Sequence: Synthetic oligonucleotide
tg

SEQ ID NO: 14087 - DNA, 2 bp, Artificial Sequence
  Description of Artificial Sequence: Synthetic oligonucleotide
tg

SEQ ID NO: 14088 - DNA, 2 bp, Artificial Sequence
  Description of Artificial Sequence: Synthetic oligonucleotide
tg

SEQ ID NO: 14089 - DNA, 2 bp, Artificial Sequence
  Description of Artificial Sequence: Synthetic oligonucleotide
tg

SEQ ID NO: 14090 - DNA, 2 bp, Artificial Sequence
  Description of Artificial Sequence: Synthetic oligonucleotide
tg

SEQ ID NO: 14091 - DNA, 2 bp, Artificial Sequence
  Description of Artificial Sequence: Synthetic oligonucleotide
tg

SEQ ID NO: 14092 - DNA, 2 bp, Artificial Sequence
  Description of Artificial Sequence: Synthetic oligonucleotide
tg

SEQ ID NO: 14093 - DNA, 201 bp, Homo sapiens
gagtgcagtggcgtgatctcggctcactgcaagctccgcctcccgggatcacgccattctcctgcctcagcctcccgagtggctgggacttacaggtgcccgccaacatgcccggctaattttctgtatttttagtagagacggggtttcaccgtgttagccaggatggtctcgatatcctgacctcgtgacccgcccacc

SEQ ID NO: 14094 - DNA, 208 bp, Homo sapiens
ctggctaacatgatgaaaccctgtctctactaaaaatataaaaaattagccgggcgtggtggcgggcgcctgtagtcccagctactcgggagactgaggccgaatggcgtgaacccgggaggcggagcttgcagtgagccgagatcacaccactgcactccagcctgggcgacagagcgagactctgtctcaaaaataaataaataaa

SEQ ID NO: 14095 - DNA, 201 bp, Homo sapiens
acacggtgaaaccccgtctctactaaagtacaaaaaattagccgggcatagtggcacaggcctttagccccagctacttgggaggctgaggtaggagaatcgcttgaacccgggaggcggagggtgcagtgagccactgcacgccagcctgggcaacagagccagactccgtctcaaaaaaaaaaaaaaaaaagaaagaaa

SEQ ID NO: 14096 - DNA, 201 bp, Homo sapiens
gccgaggtgggcgaatcacctgaggtcaggagttcaagaccagcctggtcaacatggtgaaaccccatctctactaaaaatacaaaaattaaccgggcatcgtggtgcgtgcctgtaatcccagctactcgggagactgaggcaggagaattgcttgaaccctgccggcagaggttgcaatgagctgagattgcaccacgg

SEQ ID NO: 14097 - DNA, 201 bp, Homo sapiens
ttctggaggtcatatttggacaggagccggttcttaacctcagccaagagtccacagaggggcctttgtttaactgcatggagctcatggctgacaggcgcggcggcaggacgggacgggaccggacgggctgtgtacctgtctttataccagtaccatactgttctgattactctagcttgtaagatgtttgaaacccac

SEQ ID NO: 14098 - DNA, 201 bp, Homo sapiens
aaaaccacaacaaagcctctgttcaaccacagattctgacccattggccaggcaggctgtttggcctctgatttgcacctagagggtccccggatcctggcgctgcgtgggtcagtgtctcgggagccggggaccggcactggccgtgctcggttgctgagtgtgcctcactaactatcattccgttcttccaggtcaatg

SEQ ID NO: 14099 - DNA, 201 bp, Homo sapiens
gaggccctctccatccaggtaaagaagaaagaaggatggctccaggagttcacataacatggccaaaggccgggcagcgtgcagcagaatgcaagatgagcggccaggttatagggcgagatcatgaaggattcttccccggccccaaatgttctttaagagtgtcctctcaccatccctcctctcatcccccaagaatag

SEQ ID NO: 14100 - DNA, 201 bp, Homo sapiens
ctcccaagtagctgggactacaggcgcccgccaccacgcccggctaatttttaatatttttagtagagacggggtttcactgtgttagccaggatggtctcgatctcctgacctcgtgatccgcccgcctcggcctcccaaagtgctgggattacaggcttgagccactgcgcccggccttcagttttcatatctgttaaa

SEQ ID NO: 14101 - DNA, 201 bp, Homo sapiens
ttaacacaaaaattagttgttttagccgggcgcggtggctcaagcctgtaatcccagcactttgggaggccgaggcgggcggatcacgaggtcaggagatcgagaccatcctggctaacacggtgaaaccccgtctctactaaaaacacacaaaaaatgagccgggcgcggtggcaggcgcctgtagtcccagctattcag

SEQ ID NO: 14102 - DNA, 201 bp, Homo sapiens
taaatcttgctgctgttcactctatgggtccacactgcctttatgagctgtaacactcaccgcaaaggtctgcaggttcactcctgagccggcaagaccacgaacccaccagaagaaactccgaacacatccgaacatcagaaggaacaaactccggacacgccacctttaagaactgtaacactcaccgcaagggtccgt

SEQ ID NO: 14103 - DNA, 201 bp, Homo sapiens
tcctgcctcagccttcccagtagctgggactacaggcgcccgccaccgcgcccggctaattttttgtatttttaatagaaacggggtttcaccgtggtctcgatctcctgacctcgtgatccgccgcccacctcggcctcccaaagtgctgggattacaggcgtgagccaccgcgcccggcctccttctttatttttaata

SEQ ID NO: 14104 - DNA, 201 bp, Homo sapiens
ggggtttcaccgtgttagccaggatggtctcgatctcctgaccttgtaatacgcccgcctcggccccccaaaatgctgggattacaggcgtgagccaccgcgcccagccggtttcacaggtatttatgtatatcaatagtttttttttgagacggagtctcgctctattcccaggctggagtgcaatggcgctgtcttgac

SEQ ID NO: 14105 - DNA, 235 bp, Homo sapiens
ccaattttccaggtgccgtctgtcacccctttctttgactaggaaagggaactccctgaccccttgtgcttccggagtgaggcaatgcctcgccctgcttcggctcacgcagggtgcgcgcacccactgacctgcgcccactgtctggcactccctagtgagatgaacccggtacctcagatggaaatgcagaaatcacccatcttctgcgtcgctctctctgggagctgtagac

SEQ ID NO: 14106 - DNA, 201 bp, Homo sapiens
ggtagataaagatacatgattagggccggccgcggtgactcatgcctgtaatcccagcactttgggaggccaaggcgaacggatcacgaagtcaggagatcgagaccatcctggctaacatggtgaaaccctgtctctactaaaaatacaaaaaattagccgagcgtggtggtgggcgcctgtagcgccagctactcgggg

SEQ ID NO: 14107 - DNA, 201 bp, Homo sapiens
caggtgatttctgcatttccatctgaggtaccgggttcatctcactagggagtgccagacagtgggcgcgggtcagtgggtgcgtgcaccatgcgcaagccgaagcagggcgaggcattgcctcacttgggaagcgcaaggggacagggagttccctttccgagtcaaaaaaaggggtgacagacgcacctggataatcag

SEQ ID NO: 14108 - DNA, 201 bp, Homo sapiens
agagacagaagctgctggagggcgagaggaacgcatcagtggaagaagacagaagcggctggtcacggagagcatgtcagcagaagaacacacctacagacgccggctcgcccgcgggctccccggcaggccatcgaccggtgggacgaggtggagtttgtcctgggcagtaggaggacagcccgggcacccagcggccca

SEQ ID NO: 14109 - DNA, 201 bp, Homo sapiens
cctacagaggcaggcaggcctccttgagctgtggtgggctccacccagttcgagcttcccggctgctttgtttacctaagcgagcctgggcaatggcgggcgcccctcccccagcctcgctgctgccttgcagtttgatctcagactgctgtgctagcaatcagcaagactcggtgggcataggaccctccgagccaggtg

SEQ ID NO: 14110 - DNA, 201 bp, Homo sapiens
gttccctttcctagtcaaagaaaggggtgacagaaggcacctggaaaatcgggtcactcccaccagaatactgcgcttttccgacgggcttaaaaaacggcgcacctggagattatatccggcacctggctcagagggtcctacgcccacagagtctcgctgattgctagcacagcagtctaagatcaaactgcaaggcgg

SEQ ID NO: 14111 - DNA, 201 bp, Homo sapiens
cgtccgtcacccctttctttgactcggaaagggaactccctgaccccttgtgcttcccaggtgaggcaatgcctcgccctgcttcggctcgcgcacggtgcgcgcacccactggcctgcgcccactgtctggcactcccttagtgagatgaacccggtacctcagatggaaatgcagaaatcacccgtcttctgcgtcgct

SEQ ID NO: 14112 - DNA, 201 bp, Homo sapiens
gcaagcaaggggcgtgtttcagctctgtttgtgttagagctctttcacctccaccatttggcaggttcagcgcccgggaacaatgacgtacgtggacaagcggagggtgagcaaggtgaagaggagctttactgagtaatagaacagctcagaggagactcgcggtgggtagctcctctctgcagccagggtgtcctgatg

SEQ ID NO: 14113 - DNA, 201 bp, Homo sapiens
ggcagatcacctgaggtcaggagttcgagaccagcctggccaacatggtgaaaccccgtctctactaaaaatacaaatatcagccgggcgtggtggtggtcgcctgtaatctcagctactcgggaggctgaggcaggagaattgctggatcccgggaggcagatgttgcagtgagccaagatcatgccattgcactccagc

SEQ ID NO: 14114 - DNA, 201 bp, Homo sapiens
ctgtagtatataccaccacccccctagtataccaccacccctcaacccggcccccaccgctaacaaagctgccggctgcaggaatgagagagtggtagaacgacacccccgtctcactccttgggactcctcagttgctggcggctccaagttttcaggagccacggtgttcccctcttccagatgctagtgccaacagtg

SEQ ID NO: 14115 - DNA, 201 bp, Homo sapiens
ggccagaagacggtgagtggaaagcccgggcgcgtggagagaccccaagaaggggctgttcagctgtgaatcctgcatttgccgttcgtgtttcatctggcggttttgaaaccaggttttcatctggacctctgtgagctgcatatccccggccagccacttccgctccagagggcccagatactggtagtgccggaagac

SEQ ID NO: 14116 - DNA, 207 bp, Homo sapiens
gctcctgtgacccctgcagccagcgaaccagcacatccttggggctgaagccacgtgccaggcacgtcagcgtcaccagctcgttcagggccagctcctccgacggcggcggcagcaggtggacctcgggccggaatgtgtttcctggagggtagagagccaggtcagggggctgggcaggggatgagagagcccctctgctctggt

SEQ ID NO: 14117 - DNA, 201 bp, Homo sapiens
cccatggggcagccagaagggagatggttttcccctggagttggggtgctcggcagccccggctctcccctgactgcccaggccaacctccgcctcctcccgctggtccacggcctactggcttccgggtgcctgtcagcgtgtccttctgctggggtgctcctatggatgaccagcgcttgtgtcttcttcccctgatgt

SEQ ID NO: 14118 - DNA, 201 bp, Homo sapiens
gaagacgggtgatttctgcatttccatctgaggtaccggtttcatctcactagggagtgccagacagtgggcgcaggtcagtgggtgcgtgcaccgtgcgcgaagcagggcgaggcactgcctcacttgggaagcgcaaggggtcagggagttccctttccgagtcaaagaaaggggtgacggacgcacctggaaaatcgg

SEQ ID NO: 14119 - DNA, 201 bp, Homo sapiens
ggggcgtggcctcctggagggaaccagtgtggagatgcccgtgtgcctggggcgtggcctcccggagggagtcagtgtggagatgcccgtgtgcctggggcgtggcctactagagggagtcagtgtggagatgcccgtgtgcctggggcgtggcctcctggagggaaccagtgcggagatgtcggtgtgcctggggcgtgg

SEQ ID NO: 14120 - DNA, 201 bp, Homo sapiens
gacgctcctcacctcccagatggggtggtggcggggcagagacactcctcagttcccagatggggtcgcggcctggcagaggtgctccccacatcccagacgatgggtggccgggcagagacgctcctcacttcctagacgggatgacggccaggaagaggcgctcctcacttcccagactgggcggccgggcagaggggc

SEQ ID NO: 14121 - DNA, 201 bp, Homo sapiens
gagcacagcgccggcgggctggcactgctgggggactcggcgcaccctccacagctgctgtcccgggtggtaagcccctcactgcccggggctggtggggcggccagctgctcggagtgtggggcccgccaaggccatgtccacccagaacttgctctggcctaccgcgagcagccccagttcccgccccgcgtctccctc

SEQ ID NO: 14122 - DNA, 201 bp, Homo sapiens
ctcctgagtagctggggctacaggtgcccaccaccacgcccggctaattttttgtattttcagtagagatggggtttcaccgtgttagccaggatggtctcgatctcctgacgttgtgatccaccgcctcggcctcccgaaatgctgggattacaggcctgagccaccgcacccggccatatttatttatttttaatcaga

SEQ ID NO: 14123 - DNA, 201 bp, Homo sapiens
ccccctcctcccccgactggccccgcccccactgccggccccgcccccactgccggcccgggccccacccacgccggagctgctccatttaaggagattgcgcagctggaaagctacacgtgtgagcctagaggcgggtcccggttgcagacttgccatggcctccgaagcttctgtgcgtctaggggtgccccctggccg

SEQ ID NO: 14124 - DNA, 201 bp, Homo sapiens
gttagttagttattttgagatggagtcttgctctgtcgttcaggctgtagtgcagaaccgctctcttggttcactgcaacctccaccttccgggttcaagcgataatcctgcctcagcctcccaagtagctggaattacagacgtgcactaccacgcccaactaatttttgtatttttagtagagatggggtttcgccata

SEQ ID NO: 14125 - DNA, 201 bp, Homo sapiens
gcggtctcctctgacccagatcgtcttcaaatatcgaacgctgaattgggccgggcgcggtggctcccacctgtcatcccagcactttgggaggccgaggcgggcggattatgaggtcaggagatcgagaccatcctggctaacacggtgaaaccccgtctctactaaaaatacaaaaaaaaaaaattagccgggcgtgat

SEQ ID NO: 14126 - DNA, 201 bp, Homo sapiens
ctacctttgtctctcaccctgggggtttcatgaccccggagcctccacgtcctggtacagagcctgcctctccgggactgggcttcggccgagcagacaccgcctagctgctctttgaccagcgttctctgctctgcgtctggctggcatcggcggcttgctgagtccagcctggcatctcgctggcatcggcggctcgct

SEQ ID NO: 14127 - DNA, 380 bp, Homo sapiens
ctctactaaaatacaaaaaattggctgggggtggtggcacgtgcctgtagtcccagttacacgggaggctgaagcaggggaattgcttgaacccgggaggcggagattgcagtgagccgagatcgtgccattgcactccaatggcactccagcctgatgacagagcgagactccgtctcaaaaataataataaataaataaacaaacaaacaaaaattagctgggcgtggtggcgtgtgcctgtagtcccagctactcgggagactgaggcaggagaatcgcgggaacccgggaggcggaggttgcagtgagccgagaccgcgccactgccctgcagcatggagacagagctagactccgtctaaaaaaaaaaaaaaaaa

SEQ ID NO: 14128 - DNA, 201 bp, Homo sapiens
aggcgggcggatcacgaggtcaggagatcgagaccatcctggctaatacggtgaaaccccgtctctactaaaaatacaaaaaattagctgggcgtggcggcgggcacctctagtcccagctacttgggaggctgaggcaggagaatggcgtgaacccgggaggcggagcttgcagtgagccgagatcgcgccattgcactc

SEQ ID NO: 14129 - DNA, 201 bp, Homo sapiens
aaaaactagcccggcgtggtggcacgcgcctgtaatcccaactacttgggaggctgcggcaggtgaatcacttgaagccgggaggtgaaggccgcagtaacgctgttccctgcattggatgaagtgctccccaccaaactctctcaccggagagggtgggatctgcgggctccctgggtggcttgatttcgacaccctgtg

SEQ ID NO: 14130 - DNA, 201 bp, Homo sapiens
acggcgaactgcggcgactgtgacgtgctcccccaccctctccccggtggacccttcctatttgccttcctcccaacccccaacaagcccccaccaccgacgacgtgagacgacgacggcatgggaccttccaccccgccagggccaatgaaccccacaccatgagctgcatgaggcatgagggagcccccaagggaggaa

SEQ ID NO: 14131 - DNA, 201 bp, Homo sapiens
gacgcagaagacgggtgatttctgcatttccatctgaggtaccgggttcatctcactagggagtgccagacagtgggcacaggtcagtgggtgcgcacaccgtgcgtgagccgaagcagggtgaggcattgcctcacttgggaagcgcaaggggtcagggagttccctttccgagtcaaaggggtgacggacgcacctgga

SEQ ID NO: 14132 - DNA, 201 bp, Homo sapiens
caaataattagggataaagagtatcatactgccgaacccattttatctttaattttttttttaaattttttacaaaaaattagccgggtgtggtggcgggcgcctgtagtctcagctactcagagactgaggcaggagaatggcgtgaacccgggaggaggagcttgcagtaagcggagatcgcgccactgcactacagcc

SEQ ID NO: 14133 - DNA, 201 bp, Homo sapiens
atctctgtgacccacaccctattcgtacactccctccccttttgaaaatccctaataaaaacttgctggttttacggctcaggggcatcacagaacctaccgacatgtgatgtctcccccggatgcccggctttaaaatttccctcttttgtactctgtccctttatttctcaacctggccgacgcttagggaaaacagaa

SEQ ID NO: 14134 - DNA, 201 bp, Homo sapiens
ctttggcgaactcttattgttataatcttaaaaacccggcccagggaggagcttattctccattttctatacaggcgacatatgtagaaacataatccgccgctgtgcctgtgcggccaggactccctctctacacgcaatgattcagctgaccagcccaagacatgctcggttttcacgcctgtttgtaggggcactgct

SEQ ID NO: 14135 - DNA, 201 bp, Homo sapiens
ttgggagtagaggtctttcggaaggcaccatctccagagcgtgtttctgagtaactctgaggatgggttccgggttatcactgtgtgttggaaacagcagcgcccaggctgccggaggaggctggtctccctggcaggtcctggctgtgtctagagttttgtgggtcctggagataaggctccggtttgaggcccctgggg

SEQ ID NO: 14136 - DNA, 201 bp, Homo sapiens
gcctgagcaggacaaggaccctagagtccaagagaatcctgatgatcagagaagggtccccgaggtcaccggggatgcacggtctgcatttcggcccctgcgggacaatggaggcctctctctccctttgtgcccgggcccgggcctctgcagacagacctccatacccagaggtgagaaatcagatataaccagacatcc

SEQ ID NO: 14137 - DNA, 201 bp, Homo sapiens
tcacatgctaggtcacaaaacaagtcttcagaaatttaagaagattgaaatcatatcaaccatctcttaaaaaaaataggtggccgggcgcggtggctcacgcctgtaatcccagcactttgggaggccgagacgggcggatcacgaggtcaggagatcgagaccatcctggctaacacggtgaaaccccgtctctactaa

SEQ ID NO: 14138 - DNA, 568 bp, Homo sapiens
ttagtatacagacacaaaaatgagaggtgacagcgtgctggcagccctcacagccctcgctccctctcggcacctcctcggccttggcgcccactctggccgcgtttgaggagcccttcagcccgtcgctgcactgtgggagcccctttctgggctggacaaggctggagccggctccctcagcttgcgggtaggtgtggagagagaggcgtgggcgggaaccgtggctgcaggctgcgcttgcgggccagctcgagttccgggtgggcgtgggcttggcaagccccgcactcggagcggccagccggcccgggcagtgaggagcttagcacctgggccagcagctgctgtgctcgacttctcgctgggccttagctgcctccccgccgggcagggctcgggacctgcagccctccatgcctgagcctccacccccgccgtgcgctcctgtgcagcccaagcctccccgacgagcgccaacccctgttccacggcgcccagtcccatcgactgcccaagggctgaggagtgcgggcacacggcgccggactggcaggcagctccacct

SEQ ID NO: 14139 - DNA, 201 bp, Homo sapiens
tctactaaaaatacaaaaaattagctgggcatcatggtgggtgcctgtagtcccagctactcgggaggctgaggcaggagaatggcgtgaacccgggaggcggagcttgcagtgagcggagatcgcgccgctgcactccagcctgggcgacagagcacgagtccgtctcaaaaaaagaaaaaaaagaaagaaaagaaaaga

SEQ ID NO: 14140 - DNA, 201 bp, Homo sapiens
gggctggccaaggccggagttggctccctctgcttgcggggaggtgtggagggagaggcgcaggtgggaaccagggctgtgtggggcgcttgtgggcaagcgtgagttccgggtgggagcgggctcggcaaacccattccagggtgccctgcccttcacaaagaaaactctccctggggctcccatgggcttctctgggat

SEQ ID NO: 14141 - DNA, 201 bp, Homo sapiens
tcccaagtagctgggactacaggcacccgccaccatgcctggctaattttttgtattttttagtacagatggggtttcatcgtgttaaccaggatggtctcgatctcctgacctcgtgatctgcccgccttggcctctcaaagtgccgggattacaggcgtgagccaccgtgcccagccatataccacattttctttatcc

SEQ ID NO: 14142 - DNA, 201 bp, Homo sapiens
aaccatggggtgaactttgttatggggacatgcacctggggggaaggttgtgatgggaggggcacccgggtcaaacacgggcggttgttagtgaagagcccgcaagacagagtaggagtcagggggaacagggagggaggggcatttttttctttcttttttgagacggagtctcactctgtcccccaggctggagtgcag

SEQ ID NO: 14143 - DNA, 201 bp, Homo sapiens
cacaggagcacaaaagggctggcggccttgcccgggtacactgttcgtcttctcacctactcgtgcacctcagtttatcatccctgagctgggcgtagcacgtggttcagagaacgggaagggacctacgagtgcctgacacacataatcactgctgctggtgattacccttatccatgagtggcgcatggatggggctag

SEQ ID NO: 14144 - DNA, 201 bp, Homo sapiens
caaaggtctgcttctgcatttaagcatctgagccctcaagagttagctcccgggctcctctggagcaaggttccgcccggtcccacgtacctgcctcgtccgccgtgatggtgagctcgttgctgggctcgctcttgccaatccggttcttggcgtacatgcggatgctgtaggtggaggaagggtggatatcaatgatgg

SEQ ID NO: 14145 - DNA, 201 bp, Homo sapiens
cttggctggccctgggacttgccctctggtggccaagcagtggtcatgaaagtccagccgctgtcacatccttgaggaaccggcgtacctccgcctacagcggcagctgggggcacccacgtggcccggggctgctctgacctggcagcgtatgggggctgctgcctgggcccctcagtgtgtcacttgcgcgcctcccgc

SEQ ID NO: 14146 - DNA, 201 bp, Homo sapiens
ctcggcgtcggcatccaccagcgtggttagcttggccgaagcctcgcggaagggcgggatcaggcgccgcatcgtcgtgtccagggactggaattggcgccgcccgtaggtcatgaggcccaccatggagcccagcgccgcaccctgcgagaggggtggatgtgggggtcgcagggaccccagacggcccgggaccgaccc

SEQ ID NO: 14147 - DNA, 201 bp, Homo sapiens
tggtcaccttgggagcctgctgctgatgaactgcagcatggccatctgggccgtccatcctgcatggtcacgctgtccggccactgctgcaggtacgtcccgccccgctcaatttcctggctggtggggtcatccgggtgtctgtacacgatcttctctgagagggtcagaggccggttcaatcatttgcaaacaatgtta

SEQ ID NO: 14148 - DNA, 201 bp, Homo sapiens
ccagcacacaggacacccatgcgtgtttatcatccggcacacgggagacccacgcgtgtttactgtcgggcacaggggagacccacgcgtgtttactgttcggcacacgagagacccacgcgtgtttaccgtttggcacagggagacccacgcgtgtttactgtccggcacaggggagacccacgcgtgtttactgtccgg

SEQ ID NO: 14149 - DNA, 201 bp, Homo sapiens
aggggaacagcaatagaagctccacttatcaggtacctactgtgtgtcaagcattgtgccaagggcttcatagaataatagcataagaatctcggccgggcgcagtggctcactcctgtaatcccagcactttgggaggccgaggtgggtggatcacgaggtcaggagttagagagaccagcctagccaacatggtgaaac

SEQ ID NO: 14150 - DNA, 201 bp, Homo sapiens
tgcacgcaccgtgcgcgagccgaagcagggcgaggcattgcctcactcgggaagcacgaggggtcagggagttcccattcctagtcaaagaaaggggtgacggacgcacctggaaaatcgggtcactcccacccgaatactgcgcttttccggcgggcttaaaaaacggcgcaccacgagactatatcccacacctggctc

SEQ ID NO: 14151 - DNA, 201 bp, Homo sapiens
gcccgccaccacgcccggagaattttttgtatttttagtggagacaggttttcaccatgttagccaggatggtctcgatctcctgacctcgtgatctgcccgcctcggcctcgcaaagtgctgggattataggcgtgaggcacagcgcccggtcccgactgctctatttaaagtaatgaaagcacagttggctccaaagga

SEQ ID NO: 14152 - DNA, 201 bp, Homo sapiens
cctgcggtcagctggaccaggtggccggcagcgagacggaacaagtagaccaggctgagggtgaaggcgcaggcgatcagcagcatggacaagaggttgccgcctgccacctcctccatcgcctggcccagcacctacccacccgcctgtagcaagcccagcagcatcatcccggccgccgccgccatttcactctgtcgg

SEQ ID NO: 14153 - DNA, 201 bp, Homo sapiens
ccagactgctttttttttgagacagagtctcgctctgtcacccaggctagagtgcggaggcgcgatctcagctcactgcaagctccgcctcccgggttcacgccattctcctgcctcagctttgcgagtagctgggactacaggcgcctgccaccgcgccggctaatttttttggtatttttagtagagacagggtttcac

SEQ ID NO: 14154 - DNA, 201 bp, Homo sapiens
acagtctactaaaaatacaaaaaaaaaaaaaaaaaaatttgccgggtgtggtggtgtgtgcctgtaattccagccacttgggaggctgaggcaagagaatcgactgaacccgggaggcagagattgcagtgagcccagatcatgctactgcactccagcctggataagagtgagactccatctcaaaaacaaaaataaaaa

SEQ ID NO: 14155 - DNA, 201 bp, Homo sapiens
tgtttttttttgttttgagatggagtctcactctattgcccaggctggagtgcagtggtgccatcttggctcactgcaacctccacctcccgggttctagcgattctcctgcctcagcctcccaagtagctgggattgcaggtgctcacaaccacgcccggctaatttttgtgtttttagcagagtcggagtttcaccatg

SEQ ID NO: 14156 - DNA, 201 bp, Homo sapiens
tgcctgccaccaagcccagctaatttttgtatttttagtagagacggggtttcattgtgttggccaggctggtctcgaactcctgacctcgtgatccgcccgccttggcctcccaaagtgctaggattacaagtgtgagccaccgcgtccggcctttcaaatggtatttttgattttcctcttccagtccttaaagcaggt

SEQ ID NO: 14157 - DNA, 201 bp, Homo sapiens
gccaaggtgggcggatcacttgaggtcaggagttcgagaccagcctggccaacatggtgaaaccccatctctactaaaaatatggaaaaaattagccgggcggggctcgagcctgtaatcccagctacttgggagctgaggcgcgagaatcgcttgaagccgggagggggaggttgcaggagcagaggttgtgccactgca

SEQ ID NO: 14158 - DNA, 201 bp, Homo sapiens
ggtctgtatggtgcgtgattatcctcagtggaagtttcaacatgggtgtggctcagctttttagggtcccccaaggcagaggtggcccgggcccctgcagcgatctcacaacacacttcaactgcagacggtggagactgcgggctgtcctccggctcaagcggccctggggcccccgtcctgcgcggagccacccgtgtt

SEQ ID NO: 14159 - DNA, 201 bp, Homo sapiens
gcgttttgggttactgagagaagtgaaacactgcagatacggcagaggtgtttctcccctccctccgcccctagatgtggccttcacacgcaggctgatgcgctcccttcccatccacgcctgctcggttttgccacatatgccgctgtgctgccggccttgaatgtgtatgagcggctcgtgctggggtcagcggaggct

SEQ ID NO: 14160 - DNA, 234 bp, Homo sapiens
aggggctacactcatggatccccttctccttggcaggaagatgagtgattatatctccgctatcattgaactgagcgctctgtctgtccggcgccagtatcgcttgcaccactacctcgacttcatttactaccgctcggcggatgggcggaggttccggcaggcctgtgacatggtgcaccacttcaccactgaagtcatccaggaacggcggcgggcactgcgtcagcaggg

SEQ ID NO: 14161 - DNA, 201 bp, Homo sapiens
ggggtcccttgtctccagcatcgccagcccaggtgtgttcctcatggcgtgatgcgtctgtagacttggaaacatcacaggacccaggtacttcacggagcgctcgctctgtgtcagccccagctcagcgcctcccagacaccgtctgacttcccggaggcagtcatcgacattgcgcccactgcacagatgagaaagctg

SEQ ID NO: 14162 - DNA, 201 bp, Homo sapiens
tccctagtgagatgaacccggtacctcagatggaaatgcagaaatcacccgtcttctgcgtcgctcacgctgggagctgtagaccggagctgttcctattcggccatcttggctcctccctcctgttttttttttgagacagtgtttcttttcacttctgtcacccaggctgcagtgcagtggcgcggtctgtgctcactg

SEQ ID NO: 14163 - DNA, 201 bp, Homo sapiens
taattttattttgtttttgagacagagtctcgctctgtcgcccaggctggagtgcagtggcgcaatctcggctcactgcaagctccgcctcccgggttcacgccattcgcctgcctcagcctcctgaataactgggactacaggcgtccgccaccacgcccggctaaatttttgtatttttagtagagacggggtttcatc

SEQ ID NO: 14164 - DNA, 201 bp, Homo sapiens
atccctagggctgcggatggcagaactaaaagagctaattagcaagtagaatcgccccttccggggcttcaaggtctgagcacccctcttggggtgccaccgcattcccttcggggtgacatgcctggtccagctgcaagccctgcctagaacctgcctgtgtaccggtgcttggaacagccagctggaccccacactcac

SEQ ID NO: 14165 - DNA, 201 bp, Homo sapiens
ggtccttgcagggagtttacatcagtagctcctcaccttgaggagacacgcgggccttcctcccgaagcccgtttaggaggcagatggagcgactcgactcggaggacaggagggtgttcaggggccctggcgccacagttcccacaggatgaccttggagcgttcctggatttcgagctgccctggctaaggagccgcac

SEQ ID NO: 14166 - DNA, 201 bp, Homo sapiens
cacacacaggcgtggacactcacatggctcccggcagtgctgcaggaggtcagcacagagacgtgctgaggagcctgagatgctcgctcctctgggccatcgcgtgtaaaggctgccctcgctgtggactctcacatgtgtgacatacatgaacaggcgaaacggacacgcacggcccccacacacgtgagctgggtcccc

SEQ ID NO: 14167 - DNA, 201 bp, Homo sapiens
cccctgtgaaggcaccaagcacggcagacgccctcacatcgccggggcccgtttccctgtggacgggaagtgggaacgtgacgtggacgtgacgtgggaacgtaacgtgacgtgacgtgacgtgacgtggcatggcgcgaggacagcgcggcgggagcggcgcctcagatccagcagggagggagacgaaaggcggatgga

SEQ ID NO: 14168 - DNA, 201 bp, Homo sapiens
gctgggcgtggtggcacgtgcctgcagtctcagctactcaggaggctgaggcaggagaatcccttgaacccgggacgcagaggttgcagtgagctgagatcgcgccactgcactccagcctggcaacagagtgagactccggctcaaaaaaaaaaaaaaagaaaaaaaaaaaaaaaagaaggagttgaggctttaagaact

SEQ ID NO: 14169 - DNA, 201 bp, Homo sapiens
ttgcactctgtgggtaggggacactcttctcagtggctggtgatgactgtgatcccacttgtcgagctctgtgggagtcccggcagtcctccgcaactgtcggctggttgttactgtctcagcgcctgccttctgattggttagcaaactacggtggtagacagaaaaaagatagccttcctttttagggctgtcctacaa

SEQ ID NO: 14170 - DNA, 201 bp, Homo sapiens
ccctgctggcgcaccctgctggcgcaccctgctggcgcaccctgctggcgcaccctgctggcgcaccctgctggcgcaccctgctggcgcaccctgctggcgcaagttgcgccttgggactgggcctgaaaagggaggagttattcatcttaagctttcaggcccggggagaatcttacagtaagccctctgggagtttga

SEQ ID NO: 14171 - DNA, 686 bp, Homo sapiens
gtggcacctgcaggctcccaggaccaggcagaggacccagcctccccaggactggggccccggcgctgcgctccaggggaggccgacgggggctgggaggcgcccagggcgggaatccagcgcacgggtgaggactttaaaaagcaaggggcaggatgagtcaacaaggttttgagcaggaaaactatgcgataggaagtgtatacattgccctatagcagaaagaccggggacgggaccagcctccaagcgacttcaaacccaaaaggaagcaacttccagactcttatgggcgtctcaatttgctctgggtgaaggaagacaggcaagaatttccaggtctgtgaggaccccacgtcccagggacagaagtgccagggacctgggaagtgcagacttaatacaaggcagagcaaaactcacgcgcctcggtaggacctttactccacgtgatccacttccgggtttgctgcgcaggacagaagccagtcccgggtggggcccccgaacatggtggcggggcctgggtgggacagaggcggggcgcgaggcggagagaccttgccctttagaacaggcaaagggcggggccgggaccagacctgtgcatctctccgcctcgcacccagcgcctctgtttttcgggtgtttggaggtgagagcggccaggaaggctgaggcatgat

SEQ ID NO: 14172 - DNA, 201 bp, Homo sapiens
gctagagtgcagtggtgcgatctcggctcactgcaagctccgcctcccgggttcacgccattctcctgcctcagcctccccagcagctgggacaggggcacgccgccacgcccggctagtttttgtatttttagtagagacggggtttcaccatattagccaggacggtctcgatctcctgacctcgtgatctgccagcct

SEQ ID NO: 14173 - DNA, 201 bp, Homo sapiens
gccagagaccctgtctctaaaagcaaaaaagaaaaaaaaagcccttttccaagttattacacactctgaataattaatattgaaaactgttggccgggcgcggtggctcacgcctgtaatcccagcactttgggaggccgaggcggggcggatcacgagatcagcagaacggcgtgaacccggaaggcggagcttgcagtg

SEQ ID NO: 14174 - DNA, 201 bp, Homo sapiens
ctgcatttccatctgaggtaccgggttcatctcactagggagtgccagacagtgggcgcaggtcagtgggtgcgtgcaccgtgtgcgagccgaagcagggcgaggcactgcctcacttgggaagcgcaaggggtcagggagttccctttctgagtcaaagaaaggggtgacggacgcaccttgaaaatcgggtcactccca

SEQ ID NO: 14175 - DNA, 201 bp, Homo sapiens
acgcacccactgacctgcgcccactgtctggcagtccctagtgagatgaacccggtacctcagttggaaatgcagaaatcaccatcttctgtgtcgctcacgctgggagctgtagaccggagctgttcctattcggccatgttggctcctcccccggatataaccattcttgtacttatttaattttcatttttatggaat

SEQ ID NO: 14176 - DNA, 201 bp, Homo sapiens
ttttcatgtgactactgcctgcctgtcagcgctagcctcttctgactctaaattacaagtggaagaaagcacgttagaaacccacagaactggcccggcgcggtggttcaggtctgtaatcccagcactttgggaggccgaggcaggcggaccacgaggtcaggagatcgagaccatcctggctaacagggtgaaaccccg

SEQ ID NO: 14177 - DNA, 201 bp, Homo sapiens
aagtcttttttttttttttttttttttttttttgagacggagtctcactctttcgcccaagctggactgcagtggcgctatcccggctcactgcaagctccgcctcttgggttcatgccattcttctgcctcagcctcccgagtagctgggattacaggcgcccaccaccacgcccggctaattttttgtatttttagtag

SEQ ID NO: 14178 - DNA, 201 bp, Homo sapiens
cgcctggtgcatgctgtggagggcgtgggcaatggcgtacaccgcatcaatcacaaactgcaccttgccctcctgctcgtaggtggagtcccggccgatgcgttcctcgcctgtcctagggatgcccagagaaagtgtgcccggcccccatgcaccgaacccggcctcccgccttccccctccccaccctcaccaccctcc

SEQ ID NO: 14179 - DNA, 201 bp, Homo sapiens
gactttagggggtcccaccctagcggctctctttacccttcctgtagagaaaaaagagtgccggcgggaccaccgcccaccgtgtgctcaggaggcgccccgcaacatggtgcaccccaatgtgatctgcgatggctgcaatgggcctgtggtaggaacccgctacaagtgcagcgtctgcccagactacgacttgtgtag

SEQ ID NO: 14180 - DNA, 201 bp, Homo sapiens
ggcactttatttatttagagacagagtctcgctgcgacgcccaggttggagtgcatggcgcaatcttggctcactgcaggctccgcctcccgggttccagcgattctcctgcctcagcctcccgagtagctggggttacagttatgtgccaccacgccgggctaatttttgtatttttagtagagacagggtttccccata

SEQ ID NO: 14181 - DNA, 201 bp, Homo sapiens
ccaccatgcccaactaattttttctatttgtagtagagacagggtttcactgtgttagccaggatggtctcgatctcctgaccttgtgatccgcgtgtctcggcctcccaaagtgctgggattacaggcgtgagctaccgcgcccggcttgtaaatattttctgcgcttcagtgggccatgtcttcactttgttgattgct

SEQ ID NO: 14182 - DNA, 227 bp, Homo sapiens
tcagcctcctgagtagctggaactacaggtgcccgccaccacgcccggcttattttctgtatttttagtagagacggggtttcaccatgttagccaggatcgtcttgatctcctgacctcgtgatccgccggcctcggcctcccaaagtgctgggattacaggcgtgagccaccacgcccagccctagaaattgaaatgcatattattaagtgaaagaagccaatct

SEQ ID NO: 14183 - DNA, 201 bp, Homo sapiens
ccctcccccagccttgctgccaccttgcagtttgatctcagactgctgtgctagcaatcagcgagactccgagccaggtgtgggatataatctcgtggtgcgccgttttttaagccggtcggaaaagcgcaatattcgggtgggagtgacccgattttccaggtgcgtccgtcacccctttctttgactcggaaagggaac

SEQ ID NO: 14184 - DNA, 201 bp, Homo sapiens
aggtgcgtctgtcacccctttctttgactcggaaagggaactccctgaccccttgcgcttcccaagtgaggcaatgcctctccctgcttcggctcgcgcacggtgcatgcccccactgacctgcgcccactgtctggctctcccaagtgagatgaacccggtacctcagatggaaatgcagaaatcacccgtcttctgcgt

SEQ ID NO: 14185 - DNA, 201 bp, Homo sapiens
tgcctttttgtttcagtgctcatactgtaaaaaagtgtcctttccaccgggcgcggtggctcacgcctgtaatcccagcactttgggaggcagaggcgggcggatcacgaggtcaggagatcgaaaccatcctggctaacacggtgaaaccccgtctgtactgtgaatacaaaaaattagccgggcgtggtggcgggtgcc

SEQ ID NO: 14186 - DNA, 201 bp, Homo sapiens
gccgggcgtggtggcgggcacctgtagtcccagctactcgggaggctgaggcaggagaatggggtgaacccgggaggcggagcttgcagtgagccgagatcgcgccactgcactccagcctgggtgacagagcgagactccatttcaaaaaaaaacaatactaggattgaagtttgcttcctaacttccagtgacacggtt

SEQ ID NO: 14187 - DNA, 201 bp, Homo sapiens
tgaacaagaaagggccattacattttattctgaaatggcccctggagaaagaatggaagcaaattgcacaagtgggcgtccatctccttccacccggccacggtcaccgtggtgctcggccaggctcctggtgacgtgaggcaaatctctccgctggcaaaccagcccacacactccctccattgcagacggtcacccaga

SEQ ID NO: 14188 - DNA, 201 bp, Homo sapiens
ctaagcaccttcctgtgacccgctcagaggaacccctggcagtggggatggcgtcacccccatttgagagatgaggagactgaggctcagaggggggacgcggcttgcccgagtcacactgattgagaggggcagacctggattcgtctgcagcccaagctcttagagaccccggtgtggcctgccgggcagccagcttgt

SEQ ID NO: 14189 - DNA, 201 bp, Homo sapiens
gtgtgattttggaggggcaagaaccaccccggcagctatgggggagcccacgagtgcctgacaagaggtcacgtcttcctgggacctcccagaaagccagcggaggggccggggatagtagctgctctgggctcaaggtgagcagtattgccgtccctgaggatggcgtgcaggtgaaggtactgccgatcccaggctggg

SEQ ID NO: 14190 - DNA, 201 bp, Homo sapiens
cccggatacccaggtcatctccgaatctcaaggtccttaatcgtagtcacacgtacagaggcttctttgccatgtggggtaatacggtcacagggtaagacggtcacgggtctcagacatctttgggccattatcctgtctaccgcaggtggacacagccatggaatggaagcaacttttctgattacctacggtagcttt

SEQ ID NO: 14191 - DNA, 201 bp, Homo sapiens
gattccttcgagcctgccgggagacagccacgccaatggtcacaacgggcacagcgctcaggaacgcagcaactcagccagccgccagctctttccctggcgcgggcaccacccaacgcgcccatctggggtccagatgcgataaactggccgagggactctgggccctggctgggacgagcgcagcaaacctgccgccac

SEQ ID NO: 14192 - DNA, 201 bp, Homo sapiens
ccttgaatagcagcaggtagtagagccccagggagagcaggtccccgtggtgcagcaccacggtcctgtgccccacctcggagaagttgacggagatgtgcgccccggggatgggctccaggaccagcctccccgcggcctggccgctgtccgggagcggttgccggcggatggtgcagtgtagaggcaggatgtcggggg

SEQ ID NO: 14193 - DNA, 201 bp, Homo sapiens
acagggtttcaccctgttagccaggatggtctcgatctcctgacctcgtgatccgccagcctcggcctcccaaagtgctgggattacaggcgtgagccaccgcattgggccggcagttatctttcttaagtagcagttctatttctcagtataaattaatgctgcagttcctaaaccatttgctgaagtgcctctgaaccc

SEQ ID NO: 14194 - DNA, 201 bp, Homo sapiens
ttttttttttttttttgagacagaattttgctctgttgcccaggctggagcacagtggtgcgatatcagctcactgcaaactccacctcccgggttcaagcgattttcctgcctcagcctcctgagtatctgggattacagggagtgcctccacacctggctaattttttgtatttttagtagagacagggtttcaccgtg

SEQ ID NO: 14195 - DNA, 201 bp, Homo sapiens
aacagctgggcgcggtggctcacacctgtaatcccagcactttgggaggctgaggcgggtagatcacgaggtcaggaaatcgagaccatcctggctagcacggtgaaaccccgtctccactaaaaatacaaaaaaaattagccgggcgttgtggcggacgcctgtagtcccagctactcctaaggctgaggcaggagaatg

SEQ ID NO: 14196 - DNA, 201 bp, Homo sapiens
ttgactcggaaagggaactccctgaccccttgcgcttcccaagtgaggcaatgccttgccctgctttggctggcgcacggtgcgcgcacccactgacctgcgcccactgtctggccctccctagtgagatgaacccggtacctcagatggaaatgcagaaatcacccgtcttctgcatcgctcacgctgggagctgtagac

SEQ ID NO: 14197 - DNA, 201 bp, Homo sapiens
tttttattttgttttttagacagaatctcgttgtgtcacccaggctggagtgcagtggcgtgatcttggctcactgcaacttctgcctcccgggttcacgcgattcttctgcttcagcctcccaagcagctgggattgcaggtgtgcaccaccatgcccatactaagtctttgtatttttagtagagatggggttttgcca

SEQ ID NO: 14198 - DNA, 201 bp, Homo sapiens
cagtgaaaccccgtctctactaaaaatacaaaaaattagcccggcgtggtgaagggcacctgtagtcgcagctactcaggaggctgaggcaggagaatggcgtgaacccgggaggtggagcttgcagtgaaccgagatcacgctactgcactccagcctgggcgacagagtgagactctgcctcaaagaaatagaagattt

SEQ ID NO: 14199 - DNA, 201 bp, Homo sapiens
ctctgtgaaaaataaaaaaaataagccgggcgcggtggctcacgcctgtaatcccagcactttgggaggccgaagcaggcagatcacgaggtcaggagatcgagaccatcctggctaacgcggtgaaaccccgtctctactaaaaatacaaaatattagccgggcgtagtggcgggcgcctgtagtcccagctactcggga

SEQ ID NO: 14200 - DNA, 201 bp, Homo sapiens
gagctaaagtgatacgtctgcctgggcctcccaaagtgctggaattacagatctgagccaccgggcccagcccaattactttcttcagtctgagtatgagcgccggaagaaaagctcctacctgcatctattttttttagacacagggtctccctctgtcacccaggctggagagcagtggcgcaatctccgctcggctca

SEQ ID NO: 14201 - DNA, 201 bp, Homo sapiens
ggagcatgaggcaggagagtcacttgaacccgggaggcagaggttgctgtgagccgagatcatacctctttactccagcctgagtggcagagcaagactccgtctcaaaaaaaaaaaaaaaaagttgggggaaggagagaaaaatagagagcccagtggggcaaccccccacccagcccttgccacctgccactgctccag

SEQ ID NO: 14202 - DNA, 201 bp, Homo sapiens
atatctggtttctgggatttgcacacctttgtccctcttgggtggaaagacggcttccctgaccagggctcccctgtgttccagagggcacgttccctttcgtaagtgtgagtcgcacaccagtgagcatgtgtctccacttccagggacaccggccactaggcttggggttagatggtaggactctcgtccctcccttca

SEQ ID NO: 14203 - DNA, 201 bp, Homo sapiens
ctacaggcgcccgccaccacgcccggctaattttttgtgttttgtttagtagagacggggtttcaccgtattagccaggatggtctcgatctgctgacctcgtgatccgcccgcctcggcctcccaaagtgctgggattacaggcgtgagccaccttgcgcccggcctctttatttttatatctcaaatcagagatgattt

SEQ ID NO: 14204 - DNA, 217 bp, Homo sapiens
tacaggcgccccccaccacgcccggctaattttttgtatttttagtagagacggggcttcaccgcgttagccaggatggtctcgatctcctgaccgagaccgcgccttcctgaccgcgcccggccgaccctcctcttttttctatttgttttttctctttttatcattatcaaaagcccattgtcccatactttctccttcctaatttcattcaaaa

SEQ ID NO: 14205 - DNA, 217 bp, Homo sapiens
ggtctacagctcccagcttgagcgacgcagaagacgggtgatttctgcatttccatctgaggtaccgggttcatctcactagggagtgccagacagtgggcgcaggtcagtgagtgcgtgcaccgtgcgcgagccgaagcagggcgaggcactgcctcacttgggaagggcaaggggtcagggagttccctttcccagtcaaagaaaggggtgacgg

SEQ ID NO: 14206 - DNA, 201 bp, Homo sapiens
gcccgccaccacgcccggctaaatttttgtatttttagtagagatggggtttcaccttgttaaccaggatggtgtcgatttcctgacctcgtgatccgcccgccttggcctcccaaagtgccgggattacaggcgtgagccactgcgcccggcctggaaattgttttttatgtagttgatccattttaactcccaccagca

SEQ ID NO: 14207 - DNA, 201 bp, Homo sapiens
tatatgaccctgaataagtcctgaattatccacatgtgactttccggtctcatatgaggcagaacagcacggtgtggaccgggaaccctgacgtgggagccgaaagatggggaggctgtgggcacggcccccggagccccgggactgagacatgcaggcacctcagacgggtttgctgccacaataagtgggaaatctcca

SEQ ID NO: 14208 - DNA, 201 bp, Homo sapiens
cccagagaagacccggcagcccctccagccctcggcctctgtccccgcctccttccctcctgtcctcaggcctcctctctgcagcctcccagtctcccaccgcgtcctgcgctcctggttttctcctcttctagtgtcttccccacctggcgtcgcccggccgcaaccctggccctcctggggaagaggttcggaccctac

SEQ ID NO: 14209 - DNA, 201 bp, Homo sapiens
tgtttccacattggaaaaattcaaacacctttaagagtctgactatcggccgggcgcggtggcttaacgcctgtaatcccagcactttgggaggccgaggcggccggatcacaaggtcaggagatcgtgaccatcctggctaacacggtgaaaccccgactctactaaaaaaatacaaaaaaattagccgggcgcggtggc

SEQ ID NO: 14210 - DNA, 201 bp, Homo sapiens
gatttggttgtttagaagcgtgtgccactccggatcgagccaagatggccgaataggaacagctccggtctacagctcccactgtgagcgacgcagaagacgggtgatttctgtatttccatctgaggtaccgggttcatctcactagggagtgccagacagtgggtgcaggtcagtgggtgcgcgcaccgtgcgtgagct

SEQ ID NO: 14211 - DNA, 201 bp, Homo sapiens
cttcggccgggcgccgtggctcacgcctgtaatcccagtgagaggtgatagcatgctggcagccctcgcagccctccctcaccagcgcgacttccgggtgcgcgtgggctgggctggcccgcacttggagcggccagcagccccgggcagtgaggggcttagcacctgggccagcagctgctgtgctcgacttctcgccag

SEQ ID NO: 14212 - DNA, 201 bp, Homo sapiens
tgcggccgggcgcggtggctcactcctgcaatcccagaactttgggaggccgaggcgggcggatcacgagatcagcagattgagaccatcctggctaacacggtgaaaccccgtctctattaaaaatacagaaaaagtagccgggcgtggtggcgggcacctgtagtcccagctacaggctgaggcagaagaatggcgtga

SEQ ID NO: 14213 - DNA, 201 bp, Homo sapiens
cctcggcctcccaaagtgctggggttacaggcgtgagccaccgcgcccggtcagccgtccctactaaaaatacaaaaaattagcctggcgtggtggcgggcgcctgtagtcccagctactccggaggctgaggcaggggaattgcttgaacccatgaggcggaggttctaagccgaggtcgtgccactgcactccagtctg

SEQ ID NO: 14214 - DNA, 201 bp, Homo sapiens
ggctggagtgcagtggcgtgatctcggctcgctacaaccttcacctcccagcagcctgccttggcctcccaaagtgccgagattgcagcctctgcccggccgccaccccgtctgagaagtgaggagcgtctctgcctggccgccatcccatctaggaagtgaggagcgcctcttcccggccgctatcccatctgggaagtg

SEQ ID NO: 14215 - DNA, 201 bp, Homo sapiens
gccttagctgccttcccgcggggcagggctcgggacctgcagcccgccatgcctgagcctcccaccccttccgtgggctcctgtgcggcccgagcctccccgacgagcgccaccccctgctccacggcacccagtcccattgaccacccaagggctgaggagtgcgggcgcacagtaccgggactggcaggcagctccatc

SEQ ID NO: 14216 - DNA, 286 bp, Homo sapiens
gaagacgggtgatttctgcatttccatctgaggtaccgggttcatctcactagggagtgccagacagtgggcgcaggccagtgggtgcgcgcaccgtgcgcgagccgaagcagggcgaggcattgcctcacctgggaagcgcaaggggtcagagagttccctttccgagtcaaataaatgggtgacggacgcacctggaaaatcgggtcactcccacccgattattgcgcttttcagaccggcttaaaaaacggtgcaccacgagactatatcccacacctggctc

SEQ ID NO: 14217 - DNA, 201 bp, Homo sapiens
gcctcagctgcctccctgcggggcagggcttgggacctgcagcctgccatgtgtgagcctccccccactgccctaggctcctgtgcagcaggagcctccccgacgagcaccgccccctgctccatggcacccggtcccatcgactgtggaacggctgaggagcgtgggcacaaggcatgggactggcaggcagctttgcct

SEQ ID NO: 14218 - DNA, 201 bp, Homo sapiens
ggagtgcaatggcaccatctcggctcactgcaacctccgcctcccgggttcaggcgattctcttgcctcagcctcccgagtatctgggattacaggcgcgcgcctccacgcccaactaatttttgtatttttagtagagacggagtttcaccatgttggccaggctcgtctcgaacccctgacctcgtgatccacccgcct

SEQ ID NO: 14219 - DNA, 201 bp, Homo sapiens
cctccgtcaccccttcctttgactcggaaagggaactccctgaccccttgcgcttcccgagtgaggcaatgcctcgccctgcttcggctcgcgcacattgcgcacacccactgacctgcgcccactgtctggcactccctagtgagatgaacccggtacctcagatggaaatgcagaaatcacccgtcttctgcgtcgctc

SEQ ID NO: 14220 - DNA, 201 bp, Homo sapiens
gacgcagaagacgggtgatttctgcatttccatctgaggtaccgggttcatctcactagggagtgccagacagtgggcgcaggtccgtgggtgcatgcaccgtgtgcgagctgaagcagggcgaggcattgcctcactccggaagcgcagggggtcagggagttccctttcctagtcaaagaaaggggtgacagacggcac

SEQ ID NO: 14221 - DNA, 201 bp, Homo sapiens
cccagctaattttttttatatttttaatagagacagggtttcaccatgttggccaggatagtcttgatctcttgacctcgtgatccgcccgcctcggccccgcaaagtgctgggattacaggcgtgagccaccgcacccggccggaagtatacattttaacagctctacatagtagctgctgtcagaattcaaatgaagat

SEQ ID NO: 14222 - DNA, 201 bp, Homo sapiens
cagaagacgggtgatttctgcatttccatctgaggtaccgggttcatctcactagggagtgccagacagtgggcgcaggccagtgtgtgtgcgcaccgtgcgcgagccgaagcagggcgaggcattgcctcacctgggaagcgcaaggggtcagggagttccctttctgagtcagggaaaggggtgacggatggcacctgg

SEQ ID NO: 14223 - DNA, 201 bp, Homo sapiens
ctggcagggccggccggctgctcccagtgcggggcctgccaagcccacgcccacccggaactccagctggcccgcaagcaccatgcacagcctgggttcccgctcacgcctctccatccacacctccctgcaagctgagggagcgggctctggccttggccagcccagaaaggggctctcacagtgcagcggtgggctgaa

SEQ ID NO: 14224 - DNA, 201 bp, Homo sapiens
cttgagattctcgcagccccggggcctgagctgaggggtcaccggcagtgccgtgggagtcaggctgccctcccggaagccaggctgctcctgagcagagcggaggctccatcgccctccggggggcacggtggcagtctccaggctgcactggggttggatgagctgggggtggagcacaaggggtcagtccctctcccc

SEQ ID NO: 14225 - DNA, 201 bp, Homo sapiens
aaacccctcgtctgcagggggcgggtggggaggtggaggaggggctgggccaaacgctgggggtgtgacccggggctgcgggctctcgggtctcagtcttcgggtctgccgagtgggcgagtggggtgcctcactccctgcggtctcttcccggtccccacagaacatggagaaggcgactctgccgtcggtgacgctcat

SEQ ID NO: 14226 - DNA, 201 bp, Homo sapiens
gggcgcctgtagtcccagctactcgggaggctgaggcaggagaatggcatgaacccgggaggcggagcttgcagtgagccgagatcgcgccactgcacttcggcctgggcgacagagcgagactccgtcaaaaaaaaaaaaaaaaagcagtcttgcaagatcaggtgtctggtagacaggcacactcagtaaagttacaac

SEQ ID NO: 14227 - DNA, 210 bp, Homo sapiens
ctactaaaaatacaaaaaaattagcctggcgcggtggcgggcgcctctagtcccagctgctcgggaggctgaggcaggagaatggcgtgaatccgggaggcggagcttgcggtgagccgagatcctgccacagcactccagcccgggcgacagagtgagacttcgtctcagaaaaaaaaaaaaaaaaaaaaaagaagtgggaacccagaa

SEQ ID NO: 14228 - DNA, 201 bp, Homo sapiens
ccccgggttcacgccattctctcgcctcagcctcccgagtagctgggactacaggcacccggctaattttttgtattttttatagagacggggttctcaccgtgttagccaggatggtcttgatctcctgacctcgtgatccgcctgcctgggcctcccaaagtgctgggattacaggcgtgagccaccgcgcccagcttg

SEQ ID NO: 14229 - DNA, 201 bp, Homo sapiens
gaccgttttctcgccattgtacccacacaacttgctctaaatgggcaatttattaagtatattttgtccctgttcccgccgcaggcccctgccggaccgtcgcccacaagctcccatagcccgtgagtcctctcagcctggcccggctcaccctgtggcgcccacgtctaccccgggccctttccgattcctctttaaccc

SEQ ID NO: 14230 - DNA, 201 bp, Homo sapiens
gtagtgcagtggcgcaatctcggctcactgcaagctccgcctcccgggttcacgccattctcctgcctcagcctccgggctagctgggactacaggcgcccgccactgtgccaggctaattttttgtatttttagtagagatggggtttcaccatattagccaggatggtctcgatctcctgacttcgtgacccacccgcc

SEQ ID NO: 14231 - DNA, 201 bp, Homo sapiens
tccgtgtttctccctttcgagccggcgggccacagacgtcggaagaaactcccgtatttgcagctggaactgcagcccacggcgccccggttttcctccccgccctgtccctctctggtcaaacaacatactaaagaggcgaggcaatgactgttggccagttctcaccggggaaaaacccactgttaggatggcatgaac

SEQ ID NO: 14232 - DNA, 201 bp, Homo sapiens
ggaacaaacattcctgttccacaaagacccagaattcactggatactgataaaatgtttactagaggccggcgcagtggctcatgcccataatcccggcgcggtggctcacacctgtaatcccgacgtggtggctcacacatgtaatcccagcacttcgcaaggccaggtggggggatcacttgagctcaggagttcatga

SEQ ID NO: 14233 - DNA, 201 bp, Homo sapiens
gtggtgcaattttggctcactgcaagctctgcctcccgggttcatgccattctcctgcctcaggctcccgagtagctgggactacaggtgcacaccaccacgcccggctaatttttttgtatttttagtaaagacggggtttcaccatgttagccaggatggtctcgatctcctgaccttgtgatccaccagcctcagcct

SEQ ID NO: 14234 - DNA, 201 bp, Homo sapiens
gtaaaccttctgcaaaatcctggccctccagaccccagctgggtcctcccctccaggcccccagtggcagctgtgccccttgtgtgcccacgtcggccagcgcaagccacacatggacccagtgcccactgcacccctgccagcctcagggtcccagcccgttgttccgggagacttcagtcctggcccaggcatctcctt

SEQ ID NO: 14235 - DNA, 201 bp, Homo sapiens
ttttaatttttttattaagatggagtcttgctctatcgcccaggctggagtgcagtggcgcgatcacggctcactacaacctccgcctcccgggctcaagcgattctcctgcctcagcctcccgagtagctgggattacaggcatgtgccaccatgcccaggtaattttagtacttttagttgagacggggtttcaccatg

SEQ ID NO: 14236 - DNA, 201 bp, Homo sapiens
ccccgccaggcgcggtggctcatgcctgtaatcccagcactttggaacgccgaggcaggcgaatcacgaggtcaagagatcgagactatccttgctaacacggtgaaaccccgtctctaccaaaaatacaaaaaattagccgggcgtgggggcgggcgcctgtagtcctagctgctcgggaggctgaggcaggagaatcgc

SEQ ID NO: 14237 - DNA, 201 bp, Homo sapiens
attattttctttttttttgagacggagtcttgctctgtcgcccacgctggggtgcagtggcacgatctcggctcactgcaagctccgcctcccgggttcacgccattctcctgtctcaacctctcgagtagctgggactacaggcacatgctaccacacccggctaatttttttgaatttttagtagagaggggtttcact

SEQ ID NO: 14238 - DNA, 201 bp, Homo sapiens
tccgcgaatccgggtggtgtccttttcttgtactattcagacgtgtttctaggaaggacgtgctgtcatgacccgccatggtggtcccggggatggtcagcggcgggatgatgggtgtgatgtggtcccggggatggtcagcggcaggatgatgggtgtgacgcatctgtgctacttgggattcaaattcatctatgatct

SEQ ID NO: 14239 - DNA, 201 bp, Homo sapiens
actgggtttcaccgtgttagccaggatggtctcgatttcctgaccttgtgatcagcccgcctcggcctcccaaagtgctggtattacaggcgtgagccaccgctcccggcaaagtcctttttcgatggtttcagtttgctggacaagccaggaacaaggccattggttgcaagggaggaggagctcttgtaggtggcagcg

SEQ ID NO: 14240 - DNA, 201 bp, Homo sapiens
ggtgactcaaatcgttcatgtggaacacacacacacacacacatatacacacacacgtgtcttagggacggacacacacaaacacgtgtcttaggggccccgtgtgaggagaggagattcacactactgacccagcaaccagggtcgaccccagagggctggagcacacactccgggttgacgataggcgcctggctctgg

SEQ ID NO: 14241 - DNA, 201 bp, Homo sapiens
cctcggcccgtccctttttacctcaggctgcctcaacctctccctgaaagcctggcgtccattccccatttcctgggaaacatcttgtcgctttggggtgcgccccgtgaaggagacacgctgggtgaaagccagggactccacaaccaccccccgcccccaccccgggcccagtgcaggggctgccgtgaaggcactggc

SEQ ID NO: 14242 - DNA, 201 bp, Homo sapiens
aggctgctgggaaggaactggcctccatggaagtgccccagccttcttgccctcccggcttttttcccccggctgtctcagtgtcccactgaaagcctggcgtcatatccccatcccccgggaaacttcatgcccctttggggtgccccccgtggggaagacacgcaccctgggtgaaagctagggactccatgaacaccc

SEQ ID NO: 14243 - DNA, 201 bp, Homo sapiens
accaacccaaatatccatcaatgatagactggataaagaaaatgtggtggggtggagccaagatggccgaataggaacagctccggtctacagctcccagcgtgagcgacgcagaagatgggtgatttctgcatttccaactgaggtaacgggttcatctcactggggagtgctggacagttggtgcaggacagtgggtgc

SEQ ID NO: 14244 - DNA, 201 bp, Homo sapiens
gcccgccaccacacccggctaattttttgtatttttaatagagacggggtttcaccgtgttagcaaggatggtctcgatctcctggcctcgtgatccgcccgcgtcggcctcccgaagtgctgggattacaggcatgagccaccgcgcccggccagaagtgtttttatctgtttgggaagttgcctctccctggcacctgc

SEQ ID NO: 14245 - DNA, 201 bp, Homo sapiens
tttttcatcttaaggaacaagttcttaattagattagatacagctataagtaaacataaactatgttcttatgtaacctcaagagttattttaggccgggcgcggtggctcatgcctgtaatcacagcactttcggaggccgtggcgggcggatcacgaggtcaggagattgagaccatcctggctaacatggtgaaacca

SEQ ID NO: 14246 - DNA, 201 bp, Homo sapiens
ggctaaccaggggcacgtctccccatgcacatggcgggcacctccactccagctggccggcagtggcatcgcacatggcactccacacctgcaccccttccgctttggctcagtgtggccagggatgggccttgtcagtctgcagcgtcacccgccctgtgtaaggctcagaactgctcatccacgcaagtcgggagcccg

SEQ ID NO: 14247 - DNA, 366 bp, Homo sapiens
tgagcgacgcagaagacgggtgatttctgcatttccatctgaggtaccgggttcacctcactagggagtgccaggcagtgggcgcaggccagtgggtgcgcgcaccgtgggcgagccgaagcagggcgaggcattgcctcacctgggaagcgccaggggtcagggagttccctttccgagtcaaggaaaggggtgaccgacgcacctagaaaatcgggtcactcccacccgaatattgcgcttttcagaccggcttaaaaaatggcgcaccacgagactatatcccacacctggcttggagggtcctacgcccacggaatctcactgattgctagcacagcagtctgagatcaaactgcaaggcgg

SEQ ID NO: 14248 - DNA, 201 bp, Homo sapiens
ataaaggttctccaagtccacactagactcacgagcccagctggcttcacccagtggatcccgcaccgggggccgcaggtggagctgcctgccagtcccgcgcagtgctcccacagtcctcagcccttgggcggtcgatgggaccgggcgccgtggagcagggggcagcgctcattggggaggctcggccctgcaggagcc

SEQ ID NO: 14249 - DNA, 201 bp, Homo sapiens
ggtgccgtctgtcacccctttctttgactaggaaagggaactccctgaccccttgtgcttccggagtgaggcaatgcctcgccctgcttcggctcgcgtgcggtgcgctgcacccactgtcctgcgcccactgtctggcactccctagtgagatgaacccggtacctcatatggaaatgcagaaatcactcatcttctgcg

SEQ ID NO: 14250 - DNA, 201 bp, Homo sapiens
gccgccttgcagtttgatctcagactgctgtgctagcaatcagcgagactccgtgggcataggaccctccgagccaggtgcgggatacaatctccaggtgcgccgttttttaagcctgttggaaaagtgcagtattccggttggagtgacccgattttccaggtgctgtctgtcacccctttctttgactgggaaagggaa

SEQ ID NO: 14251 - DNA, 384 bp, Homo sapiens
ctgaactgcttcaacctcaagcggctcagcctcaagtcctgcgagagcatcaccggccagggcttgcagatcgtggccgccaactgctttgacctccagacgctgaatgtccaggactgcgaggtctccgtggaggccctgcgctttgtcaaacgccactgcaagcgctgcgtcatcgagcacaccaacccggctttcttctgaagggacagagttcatccggcgttgtattcacacaaacctgaacaaagcaaatttttttaaaagcagcgtatgtaagcaccgacacccactcaaaacagctctttcttccgggaaggttattaggaatctggcctttatttttcctcatttctcatgggcaacagaggccaaagaaacgaa

SEQ ID NO: 14252 - DNA, 216 bp, Homo sapiens
gaagacgggtgatttctgcatttccatctgaggtaccgggttaatctcactagggagtgccagacagtgggcgcaggccagtgggtgcgcgcaccgtgcgcgagccgaagcagggcgaggcattgcctcacctgggaagcgcaaggggtcagggagttccctttccgagtcaaagaaaggggtgatggacgcagctggaaaatcgggtcactccca

SEQ ID NO: 14253 - DNA, 334 bp, Homo sapiens
tgacatagaagacggtgatttctgcatttccatctgaggtaccgggttcatctcactagggagtgccagacagtgggcacaggtcagtgggtgcgcgcaccgtgcgcgagccgaagcagggtaaggcaatgcctcactcgggaagcgccaggggtcagggagttccctttcctagtcaaagaaaggggtgacggacgcacctggaaaatcgggtcactcccacccgaatattgcgcttttcggaccggcctaaaaaacggcgcaccacgagattatatcccgcatctggctcggagggtcctacccgacggagtctcgctgattgccagcacag

SEQ ID NO: 14254 - DNA, 201 bp, Homo sapiens
gggatcctaaggtcttgctggtgcggcccaaaggcaccggacgttggggccaagatgacctccgcgctgccatgaaccaggccattggacgcgggctccgcgccgagcctgcagtcctcgaggagtctctcgggttcctccgttttgatcacaccttctcggatggctgccgggcttttgcctgccccgccttgcatcgag

SEQ ID NO: 14255 - DNA, 270 bp, Homo sapiens
gccactgcactccagcatgggtgacagagccagcctgaaactctgccctgcgtccttctgagaagtgacagtgtaccggcatggcagccctcacagccctcgctcgctcttggcgcctcctcggccttggcacccactctggccgcgcttgaggagcccttcagcccgccgctgcactgtggaagcccattcctgggctggccaaggccggagccggctccctcagcttgcggggaggtgtggagggagaggcacgggcgggaaccgggg

SEQ ID NO: 14256 - DNA, 253 bp, Homo sapiens
cgtgagcgacgtggaagacaggtgatttctgcatttccatctgaggtaccgggttcatctcactagggagtgccagacagtgggcgcaggtcagtgggtgcgcgcaccgtgcgcgagccgaagcagggcgaggcattgcctcacttgggaagcgcaaggggtcagggagttccgtttccgagtcaaagaaaggggtgacggacgcacctggaaaatcgggtcactcccaccggaatactgcgcttttccgacc

SEQ ID NO: 14257 - DNA, 204 bp, Homo sapiens
tcccagtaggggcggccgggcagaggcgcccctcacctcccggacggggcggctggccgggcaggggggctgaccccccccacctccctcccggacggggcggcggcaaagactgagacagctccgctgcccgctgaactccatcctcccggccaaaaccaagcttcttaacaaagatcctgaagtgttgagtttactaattta

SEQ ID NO: 14258 - DNA, 228 bp, Homo sapiens
gctaccttgcagtttgatctcagactgctgtgctagcaatcggcgagactccgtgggcgtaggaccctccgagccaggtgcgggatatagtctcctgatgcgccggtttttaagcccgtaggaaaagcgcagtattcgggtgggagaggcctgattttccacgtgctgtctgtcacccctttccttgaccaggaaagggaactccctgaccccttgtgcttcccgagt

SEQ ID NO: 14259 - DNA, 217 bp, Homo sapiens
cgcaggatgcagattgcagacgctcatcgtctcgcaggcagctccagctcgagtggtggccgtgctgggtctgtgcccggggccttcccccgtatgctttcgctttctagtgtctgcgatgacgtgcgattcactaatcacccggactcagcgcatctctatgttaaatagcgcgtgtccatctgcaaagcacacgacagcccctgcggccactggg

SEQ ID NO: 14260 - DNA, 201 bp, Homo sapiens
tcattcttgaagtcactgagaccacaagcccactggaaggaaccaactccggacacatcttgggtgttcgtctgggatattgccacacggtgagtaccatcggactcgtctgggatattgccacacggtgagtaccttcggacctgtttcactttctattctgccctatttttccttagaattcaggggttaaacaccgga

SEQ ID NO: 14261 - DNA, 204 bp, Homo sapiens
aagacaacaaactggtcctaaataaaaagtaagaaaaatgccggggaggagccaagatggccaaataggaacagctccggtctacagctcccagcgtgagcgacgcggaaaatgggtgatttctgcatttccatcggaggtaccgggttcatctcactagggagtgccagacagtgggcacaggtcagtgggtgtgcgcaccgt

SEQ ID NO: 14262 - DNA, 223 bp, Homo sapiens
cagtgggcatacagaggcagtcgggacccgtctggaagagcctccgcccggggtaaggagccgggactgtgtctaggaggcagtggggagctccggagagcgaagcgcctcctgcgcagactcgcgtgcttggagtaccggagcctgcagggcaagagagggtcttcagaagacccacgacgttccactgggatgcagagggaaacggttacttgtacttcta

SEQ ID NO: 14263 - DNA, 201 bp, Homo sapiens
cccaaagtactaggattacaagcagaaccaccgcgtctcttgttttcttttttgtttttgtttttgttttgttgttgttgttgatgttgttacagagtttcgctcttgtcgcccaggctgggatgcaatggtgtgatctcggctcattgcagcctccgcctcccggcttcaagcaattctcctgcctcagccttgtgagta

SEQ ID NO: 14264 - DNA, 203 bp, Homo sapiens
agtacaaataaattggtcgggcggtagtcccagctactcgggaggctgaggcagcagaatagcgtgaacccgggaggcggagcttgcagtgagccgagatcgcgccactgtactccagcctgggtgacagagtgagactacgtctcaaataaaaaaaaaaaaaaaaaaaaaaagcacttccctagacctagcttgatattagg

SEQ ID NO: 14265 - DNA, 201 bp, Homo sapiens
ccacgcccggctaatttttttgtattattagtagagacgaggtttcaccgaggtttcaccgtgttagccgggatggtctgggtctcctgacctcgtgatccgcccaactcggcctcccaaactgctgggattacaggcatgagacaccgcgcccggctgttgtctgatttttttcagcagtgttttgtagttctttttgta

SEQ ID NO: 14266 - DNA, 201 bp, Homo sapiens
ctcccgagtagctgggactacaggtgcctgccacctcgcccggctaattttttgtatttttagtagagatggggtttcaccgtgttagccaggatggtctcgatctcctgacctcgtgatccgccagcctcggccccccaaagtgctgggattacaggcgtgagccaccgcgcccggcccaatttaatttttaacaatggt

SEQ ID NO: 14267 - DNA, 201 bp, Homo sapiens
aaaagtcacagggggcgtgaggacagacggcgtgtcctttcctacacatatggagacgcaggccggagcaacggcacacggaccacgcacacgcggcggacgcaccaacgcctacgcagaagagaacaaaagtcgcttctaactgggcacaaaccctctgcacccaaatatcccgacacccacaaacaaaatcagaacaga

SEQ ID NO: 14268 - DNA, 201 bp, Homo sapiens
tgatctgccctcctcggcctcccaaagtgctgggattacaggcgtgagccaccgcgcccggcccaggtcactttttttttttttttttttttttttgaggcggagtctcgctctgtcgcccaggctggagtgcagtggcgcgatctcggctcactgcaagctccgccttccgggttcacatgattctcctgcctcagcctc

SEQ ID NO: 14269 - DNA, 201 bp, Homo sapiens
ggattacaggcgtgagccaccgcgcccggcctaaactatggatttttttttcccagtggagtttcgctcttgcccaggctggaataggatggcacgaactcggcttactgcaatctccacctcccgggttcaagcgattctcctgcctcagcctcccgagtagctgggattacaggcatgtgctaccatgcctggctagta

SEQ ID NO: 14270 - DNA, 201 bp, Homo sapiens
aattttttccccacccttcccgcctttctattccacaaaaccgccattgtcatcatggcccatccccaatgagctgctgggcacacctcccagacggggtcgtggccgggcagaggggctcctcacttcccagtaggggcggccgggcagaagcgcccctcacctcccggatggggcggctggccgggcggggggctgacc

SEQ ID NO: 14271 - DNA, 201 bp, Homo sapiens
gggggcccttcaagctcagctttgggcccgggtcggggtacagggtagagcgggcctccccagcccctgccatgaggccaaggcagtgcatcgttcgcagcgtacattcagaaaccaaagcctaggagctggttatcattccggtttacagctgatggaagagcaggtgcttccgagaacccacagtgctctttggccagt

SEQ ID NO: 14272 - DNA, 201 bp, Homo sapiens
tgggcagcagagtgagactctgtcttaaaaaaaaaaaaaaaaagggggggccgggtgcggtggctcacgcctgtaatcccagcactttgggagaccgaggcgggcagatcacgaggtcaggagatcgggaccatcccagctaaaacggtgaaaccccgtctctactaaaaatacaaaaaattagccgggcgtagtggcggg

SEQ ID NO: 14273 - DNA, 201 bp, Homo sapiens
gtgggagtcacagggtttcaggggaggagcgttccaggccgcggtaacagcaggtgcaaaggccctgaggcaggacggggcagggaggtccagagtccaccgcgcagagacccgggaggccggcaggcacggtgaggaccttgacttaaacccaggaaaggggaaccacactggggcatgacctcctgtactttccgagat

SEQ ID NO: 14274 - DNA, 201 bp, Homo sapiens
gggatttccccatgttggccaggctggtctcgaactcctgacctcaagtgatccacctgcctcggcctcccaaagtgatgggattataggcatgagccaccgcgcccggccaagggtcttttcagatgtaatcaagttaagatgaggtcatactgagttaggtgggccctaaatccaatggctagtgttcttataagcaca

SEQ ID NO: 14275 - DNA, 211 bp, Homo sapiens
gccctagggccggaggagcaggagacctgggcagcggggtgggcgagtgccgggaggaggtaagaggtcgcgggggaggaagacgctccccccggccttgcggggcaggtcgcgcagggcaggtcgtgcggggcaggtggggggtgccaaggaagtccgggcgtggccacaccgcagagaaagccatgggaggcacgtcctgagagctggg

SEQ ID NO: 14276 - DNA, 201 bp, Homo sapiens
gcagccaaagccatcttcttggttgaaagatactcttttcggggggaggagccaagatggccgagtaggaacagctccggtctacagctcccagcgtgagcgacaaagaagacgggtgatttctgcatttgcatctgaggtacccggttcatctcactagggagtgccagacagtgggcgcaggtcagtgggtgcgcgcac

SEQ ID NO: 14277 - DNA, 201 bp, Homo sapiens
gctcaggacctgcagcccaccatgcctgagcctcccacccactccatgggctcctgtgccgcccaagcctcccggacgagtgccaccccctgctccacggcgcccagtcccatcgaccacccaagggctgaggaatgtgagcacacggcgcaggactggcaggcagctccacctgcagccccggtgtgggatccactaggt

SEQ ID NO: 14278 - DNA, 201 bp, Homo sapiens
tggtaacattgtgaagacgtaggttctccatgggaaagactgttgtccggaagtttccacacaacaggtccccactgagattccaaggctgacagcacggcgggagtccctgggacccctgggcccggcacagcgccaccgcagcaggcaggcaccgggtggccagaagtcgatcattctcttaaatggcctgtacatatc

SEQ ID NO: 14279 - DNA, 201 bp, Homo sapiens
ctcccatgggctgacctggtgatcctccatggagaatgcgtaggagccggatattggcactgccaggtggaaaagtcccctgtcagggtgaaaagtcagacggcgtctgcctctcgctcttggagtgctcctggcctaacgcagcagtttcgcagataaacgttacagaaggtagagcgctctacagatatgaaggagtgg

SEQ ID NO: 14280 - DNA, 201 bp, Homo sapiens
gacttctggacccgctgggctgtttccgcacccggcttccctccctcaagcttgcggccgggtgtggctccctcaacctcagcgccgacctccgtgtctgcgcgctctctctctaccttcctcatccgcggggtcaggggtcacacggcaccgtcgcctgggtctccgagcagggagagtcgagtgctgactctgccagaa

SEQ ID NO: 14281 - DNA, 201 bp, Homo sapiens
ggacattttacaaaactcctgacgagtcctcctcaaaaccactaggttggccgggtgcggtggttcatgcctgtaatcccagcactttgggaggccgaggcgggcagatcacaaggtcaggagatcgagaccatcctggctaacacggtgaaaccccgtctctactaaacaatacaaaaaattagctgggcgtggcagcgg

SEQ ID NO: 14282 - DNA, 201 bp, Homo sapiens
cccctccccatccttccaggggcctgaccccttccccaaccgcacctttatagaatggtcggccagacaggaagtcccggctggcgaagcccagcccccgcgggcacaggctggcgaactccagagactcgggatccgggcaggcctcgcactcgactccccacacggccccgatggagcagcagcagacgtccatccggt

SEQ ID NO: 14283 - DNA, 201 bp, Homo sapiens
aaattagccaggcctggtggcaggcacctgtaatcccagctactccaggggttgaggcaggagaattgcctgaacccgggaggtggaggttgtagtgagccgagattgcgcctttgcactccagcctgggggacaagagtgagacttcgtctcaaaaaaaaaaaaaaaaaaaaaaaaaggccgggtggctcacacctgtaa

SEQ ID NO: 14284 - DNA, 201 bp, Homo sapiens
catcgccatgacctgcgagcgcgtgttcctcatctcgctagagctggcagtgtgcgccattcacccggtgcccggccactaccgcttcacgtggacggcgcggctggccttcacgtacgcgccctcggtggccgaggccgacgtggacgtgctgctgtccatccccatgttcctgcgcctctacctgctgggccgggtgat

SEQ ID NO: 14285 - DNA, 201 bp, Homo sapiens
cccgcggggcccgtccgctcctccagccgctgcctcccgggcggcgctcgccggcgccgactcccataatttactttttctagacagagtctttctctgtcgcccaggctggagggaagtggcatgacctcagctcactgaaacctactccttccgggttcaagcgattctcacctctgcctttggagtagctgggactac

SEQ ID NO: 14286 - DNA, 201 bp, Homo sapiens
ccacctcagcctcctgagtagctgggaccacaggcttgtgccatcatgcccagctcattttttattttattttatttttatttttattttttttttgagacggagtctcgctctgtcgcccaggctggagtgcagtggcgggatctcggctcactgcaagctccgcctcccgggttcacgccattctcctgcctcagcctc

SEQ ID NO: 14287 - DNA, 201 bp, Homo sapiens
aaatggtgatttagaggccgcccccactcgacgggctttcttagccgaagacgttcagctaatgaacctcaagcagattcatggccgggtgtgaagtcaacggagtcctcactccgtggagacgagcagcataaatctttgtttttaatgtctaatgatatgtaaaatatttaaatttgcaacgcagaattattaagctgc

SEQ ID NO: 14288 - DNA, 201 bp, Homo sapiens
ggcaggcggattactttagcttaggagttcgagaccagcctgggtaacatggcaaaatcccatctctacaaaaaatacaaaaattagccggtcatggtgccgtgcacctgtagtcccagctactagggagactgaggtgggagggtcacttaagcctgggagaggcgggtgtggtggaggttgtagtgagccaagatgcac

SEQ ID NO: 14289 - DNA, 201 bp, Homo sapiens
tagattgacagattttttttttttttgagatggagtcttgcactgtcacccgggctggagtgcagtggtgcaatctcggctcaccgcaacctccccaacccgcgttcaagcaattctcctgcctcagcctcccgagtagctgggattacagggcgtgccaccacgcctggctaattttttgtatttttagtagagatgggg

SEQ ID NO: 14290 - DNA, 201 bp, Homo sapiens
cctcgggcggcaaggattccacggtgctggcacacgtgctgcgcacgctggcaccgggcctgggcatcttactgcagctcatggctgtagacaagggcatcgggcgtggcttagcgggaggatcccagtaaggagctggggaaatacgcatgtgcctatttagggccggagcctactgaaggctcatgtgggtagtacgtg

SEQ ID NO: 14291 - DNA, 201 bp, Homo sapiens
cggctcattgcaacttccaccttccgggttcaagcgattctcctgcctcagcctcctgagtagctaggattacaggcatgcaccaccacccccggctaatcgttgaattttcagtagagacggggtttcatcacgttcgcaaggctggtctcgaacccctgatctcaggtgatgcccccacgtcggccttccaaagtgcca

SEQ ID NO: 14292 - DNA, 201 bp, Homo sapiens
cggcctcccaaagtgttgagattacaggcgtgagccaccgcgcccggcccacctcaggtgatccacccctctcagcctcccaaagtgttgagattacaggcgtgagccaccacgccgggcccacctcaggtgatccacccccctcggcctcccaaagtgttgagattacaggcgtgagccaccgcgcccggcccacctcag

SEQ ID NO: 14293 - DNA, 201 bp, Homo sapiens
gacttgagaaccgtctgcatcagcctggcttcctgcacagtgtctgcgccggtgcacaccttagaggggagctgcgccatcagatgaaccaggaccctggcggaggaagggggtgccggcagggctcccatggcacctgctgcctgtggctgaggggagcctggaagggcaccagcctcacccacccctggccgagacccc

SEQ ID NO: 14294 - DNA, 201 bp, Homo sapiens
tccggcacactcagagcacactggggctggggtagatggtggcacctgtcttggctggaggagttgggagggctggggaagggacgtgtgatctcctctccgataaacctggacgagatgccaagtataacacagaggctggcggcggggcctcctcctgttcccggtggatcaactcattgtgggactttgggcaacttt

SEQ ID NO: 14295 - DNA, 201 bp, Homo sapiens
ttaaaaaacacacacggccgggcgcggtggctcacgcctgtaatcccagcactttgggaggccgaggtgggcggatcacgaggtcaggagatcgagaccacggtgaaaccccgtctctactaaaaaaatacaaaaaattagccgggcgcagtggcgggcgcctgtagtcccagctgctcgggaggctgaggcaggagaatg

SEQ ID NO: 14296 - DNA, 201 bp, Homo sapiens
acggccacatggcagggcccctgctgcctccaccgccgccagcccagccgtccgccactctccccagtggtgcccctgccaccaatgggccccccacaaccgactcggcccacgggctgcagatgctgcggaccattggcgtggggaagtatgagttcaccgacccggggcaccccagaggtaagtcctgctgccacgtgc

SEQ ID NO: 14297 - DNA, 279 bp, Homo sapiens
gggcctgggctcgctaggtgtagaacaaggagaaaggggtagaggggaagagtcgggtcgaaccccagcgagggacccggccttccctggaggagaggatcgtactcgcgccaggagtatggactcacccagggagtgcttgggcggagaagcagcctctgctccaggccttccgctgcggcacctaaagaggccgggcggcccagaggcccgcaagccacgcccccttccaggccccgcctccgtttggccactccccttgctgtcagctcttccacc

SEQ ID NO: 14298 - DNA, 201 bp, Homo sapiens
ctggctgctatgaaatcataaattatgtttacagaaatttcagtctgagaaagaacctagattttcctttttttttttttttttttttgagactgagtctcgctctgtcgcccaggctggagtgcagtgatgccatctcggctcactgcgagctctgcctcccgggttcacgccattctctggcctcagcctcccgtgtag

SEQ ID NO: 14299 - DNA, 201 bp, Homo sapiens
tcgggggcggggcggggcggggcggggcggggcgggggggtggggctgaggcaggagaatggcgtgaacccgggaggcggagcttgcagttagccgagatcgtgccactgtactccaacccgggcgacagcgactctatctcaaaaaataataataataaaaaagaataaagattctataggcacttcttttacagcagag

SEQ ID NO: 14300 - DNA, 201 bp, Homo sapiens
ggggtctcaccgtgttagccaggatggtctcggtctcctgatgtcgtgatcctcccatctaggcctcccaaagtgctgggattataggcgtgagccaccgcgcccggcctagttcttcatttctaacaagttttcaggtgatgcttatgttggtagtcctctgagactatcacactttaagtttcagggtgttagaaaaac

SEQ ID NO: 14301 - DNA, 201 bp, Homo sapiens
tgttgttgttgtttttaagttggagtcttgttctgtcacccaggctgcagtgcagtggtacgatctcggctcactacaacctcggcctcccgggttccagcgattctcctgcctcagccacccaagtagctgggtctacaggcgcatgccactacgcctggctaatttttgtatttttaggagagacaggttttcaccatg

SEQ ID NO: 14302 - DNA, 201 bp, Homo sapiens
aaccgagctgtggaatggggttccgtggagcaggttgagtgtgccggtcgtggacgggtcgtgggcgggactccccagtgtgtcaccactgaggcatcttcgccctcttacgtgtctctgtttctctctctagaagtccaacacctccgagaggactcaaaacacagagtgaccagctcctatgtgcatttcctggacaaa

SEQ ID NO: 14303 - DNA, 201 bp, Homo sapiens
aggggagacgaagaaggagggggcagcccgctcaggaggccaggggggcatccgtgcccggctcaggcccatcgacgcagacaccattgacatttacgcccgcgctgtgttccctgcggcgtttgcggccgtcaatgtcatctactgggcggcatacgccatgtgagcacaggactcaggccaccctcgcttgtcctggcg

SEQ ID NO: 14304 - DNA, 201 bp, Homo sapiens
ccatacaccccacgcgccctgcccaccacgaggcctgtaccctctgggcagcaggtgccgcgcgcccccgggtaccttgtaggtggagccgtcggcgcagcgcagcaccccgtgtccctgacgccggtcccggacccagtcgccgtcgtacttgtcaccgttcctgggggacacacgcacggagtccactctcaacagggg

SEQ ID NO: 14305 - DNA, 201 bp, Homo sapiens
tctactacaaatacaaaaaattagccgggcgtggtggcgggcacctgtagtcccagctactcggaaggctgaggcaggaaaatgatgtgaacccgggaggcggagcttgcagtgagccgagatcgcgctgctgcacccaagcctgggcgacagagcgagactccgggtcaaaaaaaataaaagaatatagggtatggtatc

SEQ ID NO: 14306 - DNA, 201 bp, Homo sapiens
cagagtagctgggaccacaggcgcccactgccacgcccggcttatttttttttgtatttttagtagagacggggtttcaccgtgttagccaggatggtctcgatcttctgacgtgatccacccgcctcggcctcccaaagtgctgggattacaggcgtgagccaccgtgcccggcctattcatgtgctttctgggaagggg

SEQ ID NO: 14307 - DNA, 201 bp, Homo sapiens
aggcgcccgccaccacgcccggctaattttttgtatttttagtagagacggggtttcaccatgttagccaggatggtctcgatctcctgaccttgtgatccgcccacctcgtcctcctaaagtgctgggattacaggcgtgagccaccgtgcccggccgcctctcggcatacctcttattcctagcatgtggctctcacac

SEQ ID NO: 14308 - DNA, 203 bp, Homo sapiens
gttggtcatggaaggctacagtttcgcagatggtgtcggtggagtttggggcagggcattctgagcctgggaaggtttggggtgaaggcccggaggctggcgcgtaggaggctaaagcagcagggaggtctggggagagtcaggtggggttgtgtcttccacgttgcaggccgtgctcacagatggtgaaagacgttgtggaa

SEQ ID NO: 14309 - DNA, 201 bp, Homo sapiens
tcccaagtagctgggactacaggcgcccaccaccacgcccggctaatgtttttgtttttttagtagagacggggtttcaccgtgttagccaggatggtctcgatctcctgacctcgtgatcctcccgtctcggcctcccaaagtgctgggattacagcaatcactcgatggcgtgagccatcgcgcccggccatgtatgat

SEQ ID NO: 14310 - DNA, 201 bp, Homo sapiens
cctactctcgtgaaaactcttgtgcctgaaaattattgtaaaatatctggaattattattattatttatttttattttttgagacggagtctcgctctgtcgcccaggctggagtgcagtggcgcgatctcggctcactgcaagctccgcctcccgggttcacgccattctcctgcctcagcctcccgagtagctgggact

SEQ ID NO: 14311 - DNA, 201 bp, Homo sapiens
ttggcgagagacaaggcacccagggaaagaagaaaaaagcccaggaagggactccagtctgccagacccggggcagaagcccttctcggacgagctttcacggagaaactcaaataccaggggctccggaaggtcggaagcctccaagctgcccaggaaaagaccaaagagatataaactacaaaagttctgggaccccca

SEQ ID NO: 14312 - DNA, 201 bp, Homo sapiens
gtcactgatcctgagcttccgttttttcatctataaaactgagattagggccgggcatggtggctcactcctgtaatcccaacactttgggaggccgaggcgggcggatcacgaggtgaggagtttgagaccagcctgaccaacatggtgaaaccccgtctccactaaaaatacaaaaattagccgggcgtggtggcgcgt

SEQ ID NO: 14313 - DNA, 201 bp, Homo sapiens
gcatgttcattgcagaactattcacaacagcaaagacatggatagaccggattaagaaaatgtggtgtatatatatatatgccatggaatactatgcagtcgtaaaaagaacaaaatccggtcctttgcagcaacatggatgcagctggaggccattatccggagtgaattaacacaggaacagaaaaccaaatactgctt

SEQ ID NO: 14314 - DNA, 201 bp, Homo sapiens
ccccagttccgtgaccggccctctgctctgtgctgacacccagcaccctccccggcctctgctccgaggggaaaataaaacaggggccttcaggcctcaccgctggctcactccatcgcagcaaatcgaccgagggtcctctgctgcgtccttgcggcctgttgtcttactcagcggccctgacacccggcatttatttaa

SEQ ID NO: 14315 - DNA, 201 bp, Homo sapiens
gcgggcggatcacgaggtcagtagattgagaccattctggctaacatggtgaaacccagtctctactaaaaatacaaaaaattagccgggtgtggtggcacgcgactgtagtcctacctactggggaggctgaggcaggagaatcgcttgaacccgggaggcggaagttgcagtgagccgagatcgcgccactgcactccc

SEQ ID NO: 14316 - DNA, 201 bp, Homo sapiens
tctcactctccagctagctctttgtgtagtgtccagggccccggcagtcaggatagagcgagcaaaagaagatggacagtggacagggcgcagtggctcacgcctgtaatcccagcgctttgggagagcgaggcgggcagatcacaaggtcaagagatcaagaccattctggccaacatggtgaaaccctgtttctactaa

SEQ ID NO: 14317 - DNA, 201 bp, Homo sapiens
aaggcaggcggatcacggggtcaggagttcgagaccagcctggccaacttggtgaaaacccgtctctactaaagatacaaaaattagctgagtgttgtggcgcacgcctgtaatcccagctactggggaggctgaggcaagagaatcacttgcaaccgggaggcggaggatgcagtcagcgagatggcgccactgcattcc

SEQ ID NO: 14318 - DNA, 201 bp, Homo sapiens
actcagggggctgaggcaggagaatcgcttgaacccgggaggcggagtttgcagtgagccgagattgagccactgcacactccagcctgggcaacaagagcgagactcagtctcagaaaaaataaataaataataaaataaaaagcaggccgggtgcgatggttcacacctataacaccagcactttgggaggccgaggtg

SEQ ID NO: 14319 - DNA, 3238 bp, Homo sapiens
tagaacgccaggcgtgaaaggtgacgttgaggcagcacgagggaaaaagcagcaggcagcgatcgtcacacggacgacagtgccttcccggcagcccctgcgccagactcggggttgtcgtggagttcctgacttgaacccagggtgcgtgtcgcgcccacggggggacaccccaaagcggcaagaatgccccctgggaagggaacaggacgccaggcttgaaaggggactttgaagcagtccaggaaaaaacttcccacggaccacggtgccttcccggcagcccctttgccaggcccgagggggttgttgtgtcccaggcttgcacccagggttccacggggggcaccccaaagcggcaagtaggttcccaggggaaggggacagcacgtcaggcttggagggggacgttgaggcagccccgggaataaagaggggatgctggggtcctgccacggataacactgtcttcccgacagcatctgtggtgggcctgggagcgtcatggagtccttggcttgcacccaaggtgcgtgtctcgccctcggggggcaccacaaagcggcaagaaggccaccgggggaagggtatgggacgccagggttgaaagggatagttgaggcagtccggggaaaaacgtggcaggctggggtcgtcccatggacgacagtgccttcccagcagcccctgcgtcaggcccggggtggtcgtggagtccctggcttgcaccgagggtgcgggtcgcacccatgggggcaccccaaagtggcaagaaggccgccgggcgaacgccacagaaggccaggctttaatggggatgctgaggcagcacagagagaaaagcggctagtcgggttcctcctacggatgacagtgccttcctggcagtccctgcgctgggcccggggggatcgtggagtccctatcttgcacccagggtgcgtgtttcgcccatgggaggcaccccaaagcggcaagtaggcccctgggggaaggggacagcacctcagacttgaagggggactttgaggtagcccgtggaaaaaaacggcgacgctgagtttctcccacaaacgacagtgccttcctggcagccccttcgctgggccagggtggtcctggagtccgtggcttgcacccagggtgcgtgtctcgctcaagggggcaccccaaagcggcaagtagattcccgggggaagggagagcacgtcaggcttgaaggggaggttgaggcggccccggggtaaaagtggtgaagctggggtcctcccacggatgacaccgccttcctggcagcctctgcagtgggcccagaggtgtcgtggagtctctggcttgctcccaggttgtgtgtctcgcccacgagtggcaccacaaagcagcaagaaggcccccaggggaagggtacaggactccagggttgaaaggtagagttgaggcagaccggtgtcatcccaaggacaacagtgtcttgtccggtagcccctgcatcgggcctggggtggttgtggagtccctggcttgcacccggggtgcgtgtcgtgcccacgatgggcaccgcaatgcggtaagaagtccccgagtggaagggaacaggacgccgagcttgaaaggggacgttgaggcagtccggggaaaaaatttccactgagaacagtgccttcccggcagcctctgagtgggacccaggtggacggtggagcccctggcttggacccagggtgcctgtcttgctcacggggtgcacgtgaaagtggcaacagggcccccgggggaaggggacaacatgtcaggcttgaagagggacgttgggccagccagaggaaaacagcggctaggctgtggtcgtcccacagaccacagtgccttcccggcagcccctgagcctggcccaggcgggggggtttggagtccctgtcttgcaacagagtgcgtgtctcgcctaagtgtgcacgcgaaagctgcaagaagggctccgggggaagggaacaggatgccaggcttgaaaggggactttgaggcagtccagggaaaaactttccacggaggacagtgacttcccgacatcccctgcgcctggccctgggggtcttggagtccctggtttacacccagggtgcgtgcctcgcccacgggtggcaccccaaagcagcaagaaagccccggggggggaagaacaggatgccagacttgaaaggggacgttgaggcagcccaggaaaaaaaggggcgaggctggggtcctttcacggatgacagtgccttccctacagcccctatgccagtcccgggagggtcgcggagtccctgtcttgcacacaatgtgcgtgtctcgcccacggggggcaccccaaagtggcaagaagtcccccgcgggaaggcaacaggacgccaggcttgaatggggacgtttaggtagcctggagaaaaaagcagcgaggctggggtgatcccacgaatgacagtgccttaccggcagcccctttgccgggcatgcgggggttgttgattccctggcttgcacccagggtgagtgtcttgcccacggcgggcaccacaaagcagcaagaaggttcccgggggaaagggacagcacgtcagtcttgaagggggaagttgaggcagccccggggaaaaaaagcggggatgctggggtcctctcacggacgacactgccttcccagcagcctctgcagtgggcccgggagcgtcctggagtccctgtcttgcaccccgggtgcgtgtctcacccacggggagcaccacaaagcggcaagaaggccactgggggaagggtacaggacgccagggttgaaggggatagtggagacagtccaaggaaaaaagtggcgggatggtgtcgtcccaaggatggccacccctgcgccgggccagggatggtcgcggagtccctggcttgcacccaggttgtgtgtctcgcccacagggggcaccccaaagcagcacgaaggcctccaggggaagggaagaggacgccaggcttggaaggtgacgttgaggcagcagggggtaaaaagtggcgggccgggccctcccacggatgacagtgccttcccggaagccgctgcgcagggcccggcgtgtttgtggagtctctggcttgcacccagaatcgtgcggcgcccacgacgggcaccccaaagcggcaagatatcccccgctggaagggaacaggatgccaggcttgaaaggagaagttgagccagtccggggaaaaa

SEQ ID NO: 14320 - DNA, 201 bp, Homo sapiens
ccaaggctattacctcaaagtgtctcagaaaataatatacagaaggccgggcgcggtggctcacgcctgtaatcccagcactttgggaggccgaggggggcggatcacgaggtcaggagatcgagaccatcctggctaacacggtgaaaccccgtctctactaaaaacacacacacacaaaattagccgggcgaggtggca

SEQ ID NO: 14321 - DNA, 201 bp, Homo sapiens
ccaccatctattcattactctgcctgcaatttgggccatcactcattagtaatttgatgattaacacgccccacctcagcaggtgtgcaaggtgcgggggcggacacaaagactgcggcttccggagaggacggctagggggccgcctttgcaagtgctctccaaaataattggtcaccgttctcgagtgcttgggcgtcg

SEQ ID NO: 14322 - DNA, 201 bp, Homo sapiens
acggtgattagaaatgcatcaaactctgaatgtacaaaagagagagcttcaatatgaaacagtaatcctctgagaacgaagaccccgcagtgccggtgcccgctgggccgtgcaggtctcggccgccccacgcccgtgtccgtctccaccgtgaccccctcgcccccggcacgcccagggtcaacccccgggcttattgca

SEQ ID NO: 14323 - DNA, 201 bp, Homo sapiens
cctggggatcattctgcctccttgctctgacttcttctttttttttttttttttttttgagacggagtctcgctctgtcgcccaggctggagtgcagtggcgcgatctcggctcactgcaagctccacctcccgggttcacaccattctcctgcctcagcctcccgagtagctgggattacaagtacccgccaccacgccc

SEQ ID NO: 14324 - DNA, 201 bp, Homo sapiens
cccccgggacggggggacccccaggcactcccgggccctgagctgggccgccagggccgcccgccctttgccgctcttcttgggccgagctccgcccccgcgccctgcagtggagcagccgcccccaaaggtgtacgtgaccagggtgcggccgggacagcgggcatccccccgggccccagcgccgcgtgcgccctggcc

SEQ ID NO: 14325 - DNA, 201 bp, Homo sapiens
cggcgcccggcatgaaactttttttttttttttgagacagagtctcgctcttgcgcccaacctggagtgaagtggcacgattttggctcatggcaacctccgccccgcaggatcaagctattatcctgactcagcctcccgagcagttgggattacaggcacccaccactatggccggctaatttttgttttttgcttttt

SEQ ID NO: 14326 - DNA, 201 bp, Homo sapiens
aagcagcttcttaaaattttaaaaagtaagcatagctctaggaaggagggaggtcagtgaaatcaaactcctgtcgacaagcttaaagtaactggcaagacgctgggaaactagatactgaaacatccgctcttaacttttaacctgtcactatttgaaataaagttatcagggatagccgggcgcggtggctcacgcctg

SEQ ID NO: 14327 - DNA, 201 bp, Homo sapiens
atctattgaagaagctgaagtgtgaagtgtgaaattgaagaaccctgaaatgtattgagcagtgaaaagattatgtatacaaaaacaggttggccgggtgcggaggcaggcagatcacctgaggtcaggaggcgcgatctcggctcactgcaagctccacctcccgcgttcacgccattctcctgcctcagcctccggagt

SEQ ID NO: 14328 - DNA, 201 bp, Homo sapiens
attttgggaggccaaggcaggcggctgggaggtgtaggttgtagtgagccgagatcacgccactgcactccagcctgggcaccattgagcactgagtgaacgagactccgtctgcaatcccggcacctcgggaggccgaggttggcggatcactcgcggttaggggctggagaccggcccggccaacacagcgaaaccctg

SEQ ID NO: 14329 - DNA, 201 bp, Homo sapiens
gtggcgcaatctcggctcactgcaagctccgcctcccaggttcatgccattctcctgcctcagcctcctgagcagctggtactacaggcgccgaccaccacgcccggctaattttttgtattttttgatagagacggggtttcatcgtgctacccaggatggtctcgatattctgaccttgtgatccgcctgcctcggcct

SEQ ID NO: 14330 - DNA, 201 bp, Homo sapiens
ggtgggcgggtcacgaggtcaggatatcgagaccatcctggctaacacggtgaaaccccgtctctactaaaaatacagaaaattagccgggcatgttggcgggcacctgtaagtcccagccactcgggaggctgaggcaggagaatggcgtgatcccgggaggcggagcttgcagtgagccgagatcacgccactgcactc

SEQ ID NO: 14331 - DNA, 208 bp, Homo sapiens
tttatttatttatttttgagacagagtctcgctctgtcgcccaggctggagtgcagtggtgtgatctcggctcactgcaagctccgcctcccgggttcacgccattcggcctcagtctcccgagtagctgggactacaggcgcccgccaccacgcccggctaattttttatatttttagtagagacagggtttcatcatgttagccag

SEQ ID NO: 14332 - DNA, 201 bp, Homo sapiens
tttctttcttttttttttttttttttgagacggagtctggctctgttgcccaggctggcgtgcagtggctcactgcaccctccgcctcccgggttcaagcgattctcctacctcagcctcccaagtagctggggctaaaggcctgtgccactatgcccggctaattttttgtactttagtagagacggggtttcaccgtgt

SEQ ID NO: 14333 - DNA, 201 bp, Homo sapiens
ccgtggtgcaatctcagctcattgcaacctctgccggcagggttcaagcaattctcctgcctcagtctcccgagtagctgggattacaggcacgcaccacgatgcccggttaatttttgtatttttagtagagatggggtttcaccatgttgaccaggctggtcttgaactcctgacctcaggtgattcgcccacctcggc

SEQ ID NO: 14334 - DNA, 201 bp, Homo sapiens
gtgggtttcaaacatcttacaagctagagtaatcagaacagtatggtactggtataaagacaggtacacagcccgtccggtcccgtcccgtcctgccgccgcgcctgtcagccatgagctccatgcagttaaacaaaggcccctctgtggactcttggctgaggttaagaaccggctcctgtccaaatatgacctccagaa

SEQ ID NO: 14335 - DNA, 201 bp, Homo sapiens
cattgacctggaagaacggaatgatagttagtgaggcacactcagcaaccgagcacggccagtgccggtccccggctcccgagacactgacccacgcagcgccaggatccggggaccctctaggtgcaaatcagaggccaaacagcctgcctggccaatgggtcagaatctgtggttgaacagaggctttgttgtggtttt

SEQ ID NO: 14336 - DNA, 201 bp, Homo sapiens
ctattcttgggggatgagaggagggatggtgagaggacactcttaaagaacatttggggccggggaagaatccttcatgatctcgccctataacctggccgctcatcttgcattctgctgcacgctgcccggcctttggccatgttatgtgaactcctggagccatccttctttcttctttacctggatggagagggcctc

SEQ ID NO: 14337 - DNA, 201 bp, Homo sapiens
tttaacagatatgaaaactgaaggccgggcgcagtggctcaagcctgtaatcccagcactttgggaggccgaggcgggcggatcacgaggtcaggagatcgagaccatcctggctaacacagtgaaaccccgtctctactaaaaatattaaaaattagccgggcgtggtggcgggcgcctgtagtcccagctacttgggag

SEQ ID NO: 14338 - DNA, 201 bp, Homo sapiens
ctgaatagctgggactacaggcgcctgccaccgcgcccggctcattttttgtgtgtttttagtagagacggggtttcaccgtgttagccaggatggtctcgatctcctgacctcgtgatccgcccgcctcggcctcccaaagtgctgggattacaggcttgagccaccgcgcccggctaaaacaactaatttttgtgttaa

SEQ ID NO: 14339 - DNA, 201 bp, Homo sapiens
acggacccttgcggtgagtgttacagttcttaaaggtggcgtgtccggagtttgttccttctgatgttcggatgtgttcggagtttcttctggtgggttcgtggtcttgccggctcaggagtgaacctgcagacctttgcggtgagtgttacagctcataaaggcagtgtggacccatagagtgaacagcagcaagattta

SEQ ID NO: 14340 - DNA, 201 bp, Homo sapiens
tattaaaaataaagaaggaggccgggcgcggtggctcacgcctgtaatcccagcactttgggaggccgaggtgggcggcggatcacgaggtcaggagatcgagaccacggtgaaaccccgtttctattaaaaatacaaaaaattagccgggcgcggtggcgggcgcctgtagtcccagctactgggaaggctgaggcagga

SEQ ID NO: 14341 - DNA, 201 bp, Homo sapiens
gtcaagacagcgccattgcactccagcctgggaatagagcgagactccgtctcaaaaaaaaactattgatatacataaatacctgtgaaaccggctgggcgcggtggctcacgcctgtaatcccagcattttggggggccgaggcgggcgtattacaaggtcaggagatcgagaccatcctggctaacacggtgaaacccc

SEQ ID NO: 14342 - DNA, 235 bp, Homo sapiens
gtctacagctcccagagagagcgacgcagaagatgggtgatttctgcatttccatctgaggtaccgggttcatctcactagggagtgccagacagtgggcgcaggtcagtgggtgcgcgcaccctgcgtgagccgaagcagggcgaggcattgcctcactccggaagcacaaggggtcagggagttccctttcctagtcaaagaaaggggtgacagacggcacctggaaaattgg

SEQ ID NO: 14343 - DNA, 201 bp, Homo sapiens
ccccgagtagctggcgctacaggcgcccaccaccacgctcggctaattttttgtatttttagtagagacagggtttcaccatgttagccaggatggtctcgatctcctgacttcgtgatccgttcgccttggcctcccaaagtgctgggattacaggcatgagtcaccgcggccggccctaatcatgtatctttatctacc

SEQ ID NO: 14344 - DNA, 201 bp, Homo sapiens
ctgattatccaggtgcgtctgtcacccctttttttgactcggaaagggaactccctgtccccttgcgcttcccaagtgaggcaatgcctcgccctgcttcggcttgcgcatggtgcacgcacccactgacccgcgcccactgtctggcactccctagtgagatgaacccggtacctcagatggaaatgcagaaatcacctg

SEQ ID NO: 14345 - DNA, 201 bp, Homo sapiens
tgggccgctgggtgcccgggctgtcctcctactgcccaggacaaactccacctcgtcccaccggtcgatggcctgccggggagcccgcgggcgagccggcgtctgtaggtgtgttcttctgctgacatgctctccgtgaccagccgcttctgtcttcttccactgatgcgttcctctcgccctccagcagcttctgtctct

SEQ ID NO: 14346 - DNA, 201 bp, Homo sapiens
cacctggctcggagggtcctatgcccaccgagtcttgctgattgctagcacagcagtctgagatcaaactgcaaggcagcagcgaggctgggggaggggcgcccgccattgcccaggctcgcttaggtaaacaaagcagccgggaagctcgaactgggtggagcccaccacagctcaaggaggcctgcctgcctctgtagg

SEQ ID NO: 14347 - DNA, 201 bp, Homo sapiens
ccgccttgcagtttgatcttagactgctgtgctagcaatcagcgagactctgtgggcgtaggaccctctgagccaggtgccggatataatctccaggtgcgccgttttttaagcccgtcggaaaagcgcagtattctggtgggagtgacccgattttccaggtgccttctgtcacccctttctttgactaggaaagggaac

SEQ ID NO: 14348 - DNA, 201 bp, Homo sapiens
agcgacgcagaagacgggtgatttctgcatttccatctgaggtaccgggttcatctcactaagggagtgccagacagtgggcgcaggccagtgggtgcgcgcaccgtgcgcgagccgaagcagggcgaggcattgcctcacctgggaagcacaaggggtcagggagttccctttccgagtcaaagaaaggggtgacggacg

SEQ ID NO: 14349 - DNA, 201 bp, Homo sapiens
catcaggacaccctggctgcagagaggagctacccaccgcgagtctcctctgagctgttctattactcagtaaagctcctcttcaccttgctcaccctccgcttgtccacgtacgtcattgttcccgggcgctgaacctgccaaatggtggaggtgaaagagctctaacacaaacagagctgaaacacgccccttgcttgc

SEQ ID NO: 14350 - DNA, 201 bp, Homo sapiens
gctggagtgcaatggcatgatcttggctcactgcaacatctgcctcccgggatccagcaattctcctgcctcagcctcccgagtagctgagattacaggcgaccaccaccacgcccggctgatatttgtatttttagtagagacggggtttcaccatgttggccaggctggtctcgaactcctgacctcaggtgatctgcc

SEQ ID NO: 14351 - DNA, 201 bp, Homo sapiens
cactgttggcactagcatctggaagaggggaacaccgtggctcctgaaaacttggagccgccagcaactgaggagtcccaaggagtgagacgggggtgtcgttctaccactctctcattcctgcagccggcagctttgttagcggtgggggccgggttgaggggtggtggtatactaggggggtggtggtatatactacag

SEQ ID NO: 14352 - DNA, 201 bp, Homo sapiens
gtcttccggcactaccagtatctgggccctctggagcggaagtggctggccggggatatgcagctcacagaggtccagatgaaaacctggtttcaaaaccgccagatgaaacacgaacggcaaatgcaggattcacagctgaacagccccttcttggggtctctccacgcgcccgggctttccactcaccgtcttctggcc

SEQ ID NO: 14353 - DNA, 207 bp, Homo sapiens
accagagcagaggggctctctcatcccctgcccagccccctgacctggctctctaccctccaggaaacacattccggcccgaggtccacctgctgccgccgccgtcggaggagctggccctgaacgagctggtgacgctgacgtgcctggcacgtggcttcagccccaaggatgtgctggttcgctggctgcaggggtcacaggagc

SEQ ID NO: 14354 - DNA, 201 bp, Homo sapiens
acatcaggggaagaagacacaagcgctggtcatccataggagcaccccagcagaaggacacgctgacaggcacccggaagccagtaggccgtggaccagcgggaggaggcggaggttggcctgggcagtcaggggagagccggggctgccgagcaccccaactccaggggaaaaccatctcccttctggctgccccatggg

SEQ ID NO: 14355 - DNA, 201 bp, Homo sapiens
ccgattttccaggtgcgtccgtcacccctttctttgactcggaaagggaactccctgaccccttgcgcttcccaagtgaggcagtgcctcgccctgcttcgcgcacggtgcacgcacccactgacctgcgcccactgtctggcactccctagtgagatgaaaccggtacctcagatggaaatgcagaaatcacccgtcttc

SEQ ID NO: 14356 - DNA, 201 bp, Homo sapiens
ccacgccccaggcacaccgacatctccgcactggttccctccaggaggccacgccccaggcacacgggcatctccacactgactccctctagtaggccacgccccaggcacacgggcatctccacactgactccctccgggaggccacgccccaggcacacgggcatctccacactggttccctccaggaggccacgcccc

SEQ ID NO: 14357 - DNA, 201 bp, Homo sapiens
gcccctctgcccggccgcccagtctgggaagtgaggagcgcctcttcctggccgtcatcccgtctaggaagtgaggagcgtctctgcccggccacccatcgtctgggatgtggggagcacctctgccaggccgcgaccccatctgggaactgaggagtgtctctgccccgccaccaccccatctgggaggtgaggagcgtc

SEQ ID NO: 14358 - DNA, 201 bp, Homo sapiens
gagggagacgcggggcgggaactggggctgctcgcggtaggccagagcaagttctgggtggacatggccttggcgggccccacactccgagcagctggccgccccaccagccccgggcagtgaggggcttaccacccgggacagcagctgtggagggtgcgccgagtcccccagcagtgccagcccgccggcgctgtgctc

SEQ ID NO: 14359 - DNA, 201 bp, Homo sapiens
tctgattaaaaataaataaatatggccgggtgcggtggctcaggcctgtaatcccagcatttcgggaggccgaggcggtggatcacaacgtcaggagatcgagaccatcctggctaacacggtgaaaccccatctctactgaaaatacaaaaaattagccgggcgtggtggtgggcacctgtagccccagctactcaggag

SEQ ID NO: 14360 - DNA, 201 bp, Homo sapiens
cggccagggggcacccctagacgcacagaagcttcggaggccatggcaagtctgcaaccgggacccgcctctaggctcacacgtgtagctttccagctgcgcaatctccttaaatggagcagctccggcgtgggtggggcccgggccggcagtgggggcggggccggcagtgggggcggggccagtcgggggaggaggggg

SEQ ID NO: 14361 - DNA, 201 bp, Homo sapiens
tatggcgaaaccccatctctactaaaaatacaaaaattagttgggcgtggtagtgcacgtctgtaattccagctacttgggaggctgaggcaggattatcgcttgaacccggaaggtggaggttgcagtgaaccaagagagcggttctgcactacagcctgaacgacagagcaagactccatctcaaaataactaactaac

SEQ ID NO: 14362 - DNA, 201 bp, Homo sapiens
atcacgcccggctaattttttttttttgtatttttagtagagacggggtttcaccgtgttagccaggatggtctcgatctcctgacctcataatccgcccgcctcggcctcccaaagtgctgggatgacaggtgggagccaccgcgcccggcccaattcagcgttcgatatttgaagacgatctgggtcagaggagaccgc

SEQ ID NO: 14363 - DNA, 201 bp, Homo sapiens
agcgagccgccgatgccagcgagatgccaggctggactcagcaagccgccgatgccagccagacgcagagcagagaacgctggtcaaagagcagctaggcggtgtctgctcggccgaagcccagtcccggagaggcaggctctgtaccaggacgtggaggctccggggtcatgaaacccccagggtgagagacaaaggtag

SEQ ID NO: 14364 - DNA, 380 bp, Homo sapiens
tttttttttttttttttagacggagtctagctctgtctccatgctgcagggcagtggcgcggtctcggctcactgcaacctccgcctcccgggttcccgcgattctcctgcctcagtctcccgagtagctgggactacaggcacacgccaccacgcccagctaatttttgtttgtttgtttatttatttattattatttttgagacggagtctcgctctgtcatcaggctggagtgccattggagtgcaatggcacgatctcggctcactgcaatctccgcctcccgggttcaagcaattcccctgcttcagcctcccgtgtaactgggactacaggcacgtgccaccacccccagccaattttttgtattttagtagag

SEQ ID NO: 14365 - DNA, 201 bp, Homo sapiens
gagtgcaatggcgcgatctcggctcactgcaagctccgcctcccgggttcacgccattctcctgcctcagcctcccaagtagctgggactagaggtgcccgccgccacgcccagctaattttttgtatttttagtagagacggggtttcaccgtattagccaggatggtctcgatctcctgacctcgtgatccgcccgcct

SEQ ID NO: 14366 - DNA, 201 bp, Homo sapiens
cacagggtgtcgaaatcaagccacccagggagcccgcagatcccaccctctccggtgagagagtttggtggggagcacttcatccaatgcagggaacagcgttactgcggccttcacctcccggcttcaagtgattcacctgccgcagcctcccaagtagttgggattacaggcgcgtgccaccacgccgggctagttttt

SEQ ID NO: 14367 - DNA, 201 bp, Homo sapiens
ttcctcccttgggggctccctcatgcctcatgcagctcatggtgtggggttcattggccctggcggggtggaaggtcccatgccgtcgtcgtctcacgtcgtcggtggtgggggcttgttgggggttgggaggaaggcaaataggaagggtccaccggggagagggtgggggagcacgtcacagtcgccgcagttcgccgt

SEQ ID NO: 14368 - DNA, 201 bp, Homo sapiens
tccaggtgcgtccgtcacccctttgactcggaaagggaactccctgaccccttgcgcttcccaagtgaggcaatgcctcaccctgcttcggctcacgcacggtgtgcgcacccactgacctgtgcccactgtctggcactccctagtgagatgaacccggtacctcagatggaaatgcagaaatcacccgtcttctgcgtc

SEQ ID NO: 14369 - DNA, 201 bp, Homo sapiens
ggctgtagtgcagtggcgcgatctccgcttactgcaagctcctcctcccgggttcacgccattctcctgcctcagtctctgagtagctgagactacaggcgcccgccaccacacccggctaattttttgtaaaaaatttaaaaaaaaaattaaagataaaatgggttcggcagtatgatactctttatccctaattatttg

SEQ ID NO: 14370 - DNA, 201 bp, Homo sapiens
ttctgttttccctaagcgtcggccaggttgagaaataaagggacagagtacaaaagagggaaattttaaagccgggcatccgggggagacatcacatgtcggtaggttctgtgatgcccctgagccgtaaaaccagcaagtttttattagggattttcaaaaggggagggagtgtacgaatagggtgtgggtcacagagat

SEQ ID NO: 14371 - DNA, 201 bp, Homo sapiens
agcagtgcccctacaaacaggcgtgaaaaccgagcatgtcttgggctggtcagctgaatcattgcgtgtagagagggagtcctggccgcacaggcacagcggcggattatgtttctacatatgtcgcctgtatagaaaatggagaataagctcctccctgggccgggtttttaagattataacaataagagttcgccaaag

SEQ ID NO: 14372 - DNA, 201 bp, Homo sapiens
ccccaggggcctcaaaccggagccttatctccaggacccacaaaactctagacacagccaggacctgccagggagaccagcctcctccggcagcctgggcgctgctgtttccaacacacagtgataacccggaacccatcctcagagttactcagaaacacgctctggagatggtgccttccgaaagacctctactcccaa

SEQ ID NO: 14373 - DNA, 201 bp, Homo sapiens
ggatgtctggttatatctgatttctcacctctgggtatggaggtctgtctgcagaggcccgggcccgggcacaaagggagagagaggcctccattgtcccgcaggggccgaaatgcagaccgtgcatccccggtgacctcggggacccttctctgatcatcaggattctcttggactctagggtccttgtcctgctcaggc

SEQ ID NO: 14374 - DNA, 201 bp, Homo sapiens
ttagtagagacggggtttcaccgtgttagccaggatggtctcgatctcctgacctcgtgatccgcccgtctcggcctcccaaagtgctgggattacaggcgtgagccaccgcgcccggccacctattttttttaagagatggttgatatgatttcaatcttcttaaatttctgaagacttgttttgtgacctagcatgtga

SEQ ID NO: 14375 - DNA, 568 bp, Homo sapiens
aggtggagctgcctgccagtccggcgccgtgtgcccgcactcctcagcccttgggcagtcgatgggactgggcgccgtggaacaggggttggcgctcgtcggggaggcttgggctgcacaggagcgcacggcgggggtggaggctcaggcatggagggctgcaggtcccgagccctgcccggcggggaggcagctaaggcccagcgagaagtcgagcacagcagctgctggcccaggtgctaagctcctcactgcccgggccggctggccgctccgagtgcggggcttgccaagcccacgcccacccggaactcgagctggcccgcaagcgcagcctgcagccacggttcccgcccacgcctctctctccacacctacccgcaagctgagggagccggctccagccttgtccagcccagaaaggggctcccacagtgcagcgacgggctgaagggctcctcaaacgcggccagagtgggcgccaaggccgaggaggtgccgagagggagcgagggctgtgagggctgccagcacgctgtcacctctcatttttgtgtctgtatactaa

SEQ ID NO: 14376 - DNA, 201 bp, Homo sapiens
tcttttcttttctttcttttttttctttttttgagacggactcgtgctctgtcgcccaggctggagtgcagcggcgcgatctccgctcactgcaagctccgcctcccgggttcacgccattctcctgcctcagcctcccgagtagctgggactacaggcacccaccatgatgcccagctaattttttgtatttttagtaga

SEQ ID NO: 14377 - DNA, 201 bp, Homo sapiens
atcccagagaagcccatgggagccccagggagagttttctttgtgaagggcagggcaccctggaatgggtttgccgagcccgctcccacccggaactcacgcttgcccacaagcgccccacacagccctggttcccacctgcgcctctccctccacacctccccgcaagcagagggagccaactccggccttggccagccc

SEQ ID NO: 14378 - DNA, 201 bp, Homo sapiens
ggataaagaaaatgtggtatatggctgggcacggtggctcacgcctgtaatcccggcactttgagaggccaaggcgggcagatcacgaggtcaggagatcgagaccatcctggttaacacgatgaaaccccatctgtactaaaaaatacaaaaaattagccaggcatggtggcgggtgcctgtagtcccagctacttggga

SEQ ID NO: 14379 - DNA, 201 bp, Homo sapiens
ctgcactccagcctgggggacagagtgagactccgtctcaaaaaagaaagaaaaaaatgcccctccctccctgttccccctgactcctactctgtcttgcgggctcttcactaacaaccgcccgtgtttgacccgggtgcccctcccatcacaaccttccccccaggtgcatgtccccataacaaagttcaccccatggtt

SEQ ID NO: 14380 - DNA, 201 bp, Homo sapiens
ctagccccatccatgcgccactcatggataagggtaatcaccagcagcagtgattatgtgtgtcaggcactcgtaggtcccttcccgttctctgaaccacgtgctacgcccagctcagggatgataaactgaggtgcacgagtaggtgagaagacgaacagtgtacccgggcaaggccgccagcccttttgtgctcctgtg

SEQ ID NO: 14381 - DNA, 201 bp, Homo sapiens
ccatcattgatatccacccttcctccacctacagcatccgcatgtacgccaagaaccggattggcaagagcgagcccagcaacgagctcaccatcacggcggacgaggcaggtacgtgggaccgggcggaaccttgctccagaggagcccgggagctaactcttgagggctcagatgcttaaatgcagaagcagacctttg

SEQ ID NO: 14382 - DNA, 201 bp, Homo sapiens
gcgggaggcgcgcaagtgacacactgaggggcccaggcagcagcccccatacgctgccaggtcagagcagccccgggccacgtgggtgcccccagctgccgctgtaggcggaggtacgccggttcctcaaggatgtgacagcggctggactttcatgaccactgcttggccaccagagggcaagtcccagggccagccaag

SEQ ID NO: 14383 - DNA, 201 bp, Homo sapiens
gggtcggtcccgggccgtctggggtccctgcgacccccacatccacccctctcgcagggtgcggcgctgggctccatggtgggcctcatgacctacgggcggcgccaattccagtccctggacacgacgatgcggcgcctgatcccgcccttccgcgaggcttcggccaagctaaccacgctggtggatgccgacgccgag

SEQ ID NO: 14384 - DNA, 201 bp, Homo sapiens
taacattgtttgcaaatgattgaaccggcctctgaccctctcagagaagatcgtgtacagacacccggatgaccccaccagccaggaaattgagcggggcgggacgtacctgcagcagtggccggacagcgtgaccatgcaggatggacggcccagatggccatgctgcagttcatcagcagcaggctcccaaggtgacca

SEQ ID NO: 14385 - DNA, 201 bp, Homo sapiens
ccggacagtaaacacgcgtgggtctcccctgtgccggacagtaaacacgcgtgggtctccctgtgccaaacggtaaacacgcgtgggtctctcgtgtgccgaacagtaaacacgcgtgggtctcccctgtgcccgacagtaaacacgcgtgggtctcccgtgtgccggatgataaacacgcatgggtgtcctgtgtgctgg

SEQ ID NO: 14386 - DNA, 201 bp, Homo sapiens
gtttcaccatgttggctaggctggtctctctaactcctgacctcgtgatccacccacctcggcctcccaaagtgctgggattacaggagtgagccactgcgcccggccgagattcttatgctattattctatgaagcccttggcacaatgcttgacacacagtaggtacctgataagtggagcttctattgctgttcccct

SEQ ID NO: 14387 - DNA, 201 bp, Homo sapiens
gagccaggtgtgggatatagtctcgtggtgcgccgttttttaagcccgccggaaaagcgcagtattcgggtgggagtgacccgattttccaggtgcgtccgtcacccctttctttgactaggaatgggaactccctgacccctcgtgcttcccgagtgaggcaatgcctcgccctgcttcggctcgcgcacggtgcgtgca

SEQ ID NO: 14388 - DNA, 201 bp, Homo sapiens
tcctttggagccaactgtgctttcattactttaaatagagcagtcgggaccgggcgctgtgcctcacgcctataatcccagcactttgcgaggccgaggcgggcagatcacgaggtcaggagatcgagaccatcctggctaacatggtgaaaacctgtctccactaaaaatacaaaaaattctccgggcgtggtggcgggc

SEQ ID NO: 14389 - DNA, 201 bp, Homo sapiens
ccgacagagtgaaatggcggcggcggccgggatgatgctgctgggcttgctacaggcgggtgggtaggtgctgggccaggcgatggaggaggtggcaggcggcaacctcttgtccatgctgctgatcgcctgcgccttcaccctcagcctggtctacttgttccgtctcgctgccggccacctggtccagctgaccgcagg

SEQ ID NO: 14390 - DNA, 201 bp, Homo sapiens
gtgaaaccctgtctctactaaaaataccaaaaaaattagccggcgcggtggcaggcgcctgtagtcccagctactcgcaaagctgaggcaggagaatggcgtgaacccgggaggcggagcttgcagtgagctgagatcgcgcctccgcactctagcctgggtgacagagcgagactctgtctcaaaaaaaaagcagtctgg

SEQ ID NO: 14391 - DNA, 201 bp, Homo sapiens
tttttatttttgtttttgagatggagtctcactcttatccaggctggagtgcagtagcatgatctgggctcactgcaatctctgcctcccgggttcagtcgattctcttgcctcagcctcccaagtggctggaattacaggcacacaccaccacacccggcaaatttttttttttttttttttgtatttttagtagactgt

SEQ ID NO: 14392 - DNA, 201 bp, Homo sapiens
catggtgaaactccgactctgctaaaaacacaaaaattagccgggcgtggttgtgagcacctgcaatcccagctacttgggaggctgaggcaggagaatcgctagaacccgggaggtggaggttgcagtgagccaagatggcaccactgcactccagcctgggcaatagagtgagactccatctcaaaacaaaaaaaaaca

SEQ ID NO: 14393 - DNA, 201 bp, Homo sapiens
acctgctttaaggactggaagaggaaaatcaaaaataccatttgaaaggccggacgcggtggctcacacttgtaatcctagcactttgggaggccaaggcgggcggatcacgaggtcaggagttcgagaccagcctggccaacacaatgaaaccccgtctctactaaaaatacaaaaattagctgggcttggtggcaggca

SEQ ID NO: 14394 - DNA, 201 bp, Homo sapiens
tgcagtggcacaacctctgctcctgcaacctccccctcccggcttcaagcgattctcgcgcctcagctcccaagtagctgggattacaggctcgagccccgcccggctaattttttccatatttttagtagagatggggtttcaccatgttggccaggctggtctcgaactcctgacctcaagtgatccgcccaccttggc

SEQ ID NO: 14395 - DNA, 201 bp, Homo sapiens
aacacgggtggctccgcgcaggacgggggccccagggccgcttgagccggaggacagcccgcagtctccaccgtctgcagttgaagtgtgttgtgagatcgctgcaggggcccgggccacctctgccttgggggaccctaaaaagctgagccacacccatgttgaaacttccactgaggataatcacgcaccatacagacc

SEQ ID NO: 14396 - DNA, 201 bp, Homo sapiens
agcctccgctgaccccagcacgagccgctcatacacattcaaggccggcagcacagcggcatatgtggcaaaaccgagcaggcgtggatgggaagggagcgcatcagcctgcgtgtgaaggccacatctaggggcggagggaggggagaaacacctctgccgtatctgcagtgtttcacttctctcagtaacccaaaacgc

SEQ ID NO: 14397 - DNA, 234 bp, Homo sapiens
ccctgctgacgcagtgcccgccgccgttcctggatgacttcagtggtgaagtggtgcaccatgtcacaggcctgccggaacctccgcccatccgccgagcggtagtaaatgaagtcgaggtagtggtgcaagcgatactggcgccggacagacagagcgctcagttcaatgatagcggagatataatcactcatcttcctgccaaggagaaggggatccatgagtgtagcccct

SEQ ID NO: 14398 - DNA, 201 bp, Homo sapiens
cagctttctcatctgtgcagtgggcgcaatgtcgatgactgcctccgggaagtcagacggtgtctgggaggcgctgagctggggctgacacagagcgagcgctccgtgaagtacctgggtcctgtgatgtttccaagtctacagacgcatcacgccatgaggaacacacctgggctggcgatgctggagacaagggacccc

SEQ ID NO: 14399 - DNA, 201 bp, Homo sapiens
cagtgagcacagaccgcgccactgcactgcagcctgggtgacagaagtgaaaagaaacactgtctcaaaaaaaaaacaggagggaggagccaagatggccgaataggaacagctccggtctacagctcccagcgtgagcgacgcagaagacgggtgatttctgcatttccatctgaggtaccgggttcatctcactaggga

SEQ ID NO: 14400 - DNA, 201 bp, Homo sapiens
gatgaaaccccgtctctactaaaaatacaaaaatttagccgggcgtggtggcggacgcctgtagtcccagttattcaggaggctgaggcaggcgaatggcgtgaacccgggaggcggagcttgcagtgagccgagattgcgccactgcactccagcctgggcgacagagcgagactctgtctcaaaaacaaaataaaatta

SEQ ID NO: 14401 - DNA, 201 bp, Homo sapiens
gtgagtgtggggtccagctggctgttccaagcaccggtacacaggcaggttctaggcagggcttgcagctggaccaggcatgtcaccccgaagggaatgcggtggcaccccaagaggggtgctcagaccttgaagccccggaaggggcgattctacttgctaattagctcttttagttctgccatccgcagccctagggat

SEQ ID NO: 14402 - DNA, 201 bp, Homo sapiens
gtgcggctccttagccagggcagctcgaaatccaggaacgctccaaggtcatcctgtgggaactgtggcgccagggcccctgaacaccctcctgtcctccgagtcgagtcgctccatctgcctcctaaacgggcttcgggaggaaggcccgcgtgtctcctcaaggtgaggagctactgatgtaaactccctgcaaggacc

SEQ ID NO: 14403 - DNA, 201 bp, Homo sapiens
ggggacccagctcacgtgtgtgggggccgtgcgtgtccgtttcgcctgttcatgtatgtcacacatgtgagagtccacagcgagggcagcctttacacgcgatggcccagaggagcgagcatctcaggctcctcagcacgtctctgtgctgacctcctgcagcactgccgggagccatgtgagtgtccacgcctgtgtgtg

SEQ ID NO: 14404 - DNA, 201 bp, Homo sapiens
tccatccgcctttcgtctccctccctgctggatctgaggcgccgctcccgccgcgctgtcctcgcgccatgccacgtcacgtcacgtcacgtcacgttacgttcccacgtcacgtccacgtcacgttcccacttcccgtccacagggaaacgggccccggcgatgtgagggcgtctgccgtgcttggtgccttcacagggg

SEQ ID NO: 14405 - DNA, 201 bp, Homo sapiens
agttcttaaagcctcaactccttcttttttttttttttttctttttttttttttttgagccggagtctcactctgttgccaggctggagtgcagtggcgcgatctcagctcactgcaacctctgcgtcccgggttcaagggattctcctgcctcagcctcctgagtagctgagactgcaggcacgtgccaccacgcccagc

SEQ ID NO: 14406 - DNA, 201 bp, Homo sapiens
ttgtaggacagccctaaaaaggaaggctatcttttttctgtctaccaccgtagtttgctaaccaatcagaaggcaggcgctgagacagtaacaaccagccgacagttgcggaggactgccgggactcccacagagctcgacaagtgggatcacagtcatcaccagccactgagaagagtgtcccctacccacagagtgcaa

SEQ ID NO: 14407 - DNA, 201 bp, Homo sapiens
tcaaactcccagagggcttactgtaagattctccccgggcctgaaagcttaagatgaataactcctcccttttcaggcccagtcccaaggcgcaacttgcgccagcagggtgcgccagcagggtgcgccagcagggtgcgccagcagggtgcgccagcagggtgcgccagcagggtgcgccagcagggtgcgccagcaggg

SEQ ID NO: 14408 - DNA, 686 bp, Homo sapiens
atcatgcctcagccttcctggccgctctcacctccaaacacccgaaaaacagaggcgctgggtgcgaggcggagagatgcacaggtctggtcccggccccgccctttgcctgttctaaagggcaaggtctctccgcctcgcgccccgcctctgtcccacccaggccccgccaccatgttcgggggccccacccgggactggcttctgtcctgcgcagcaaacccggaagtggatcacgtggagtaaaggtcctaccgaggcgcgtgagttttgctctgccttgtattaagtctgcacttcccaggtccctggcacttctgtccctgggacgtggggtcctcacagacctggaaattcttgcctgtcttccttcacccagagcaaattgagacgcccataagagtctggaagttgcttccttttgggtttgaagtcgcttggaggctggtcccgtccccggtctttctgctatagggcaatgtatacacttcctatcgcatagttttcctgctcaaaaccttgttgactcatcctgccccttgctttttaaagtcctcacccgtgcgctggattcccgccctgggcgcctcccagcccccgtcggcctcccctggagcgcagcgccggggccccagtcctggggaggctgggtcctctgcctggtcctgggagcctgcaggtgccac

SEQ ID NO: 14409 - DNA, 201 bp, Homo sapiens
aggctggcagatcacgaggtcaggagatcgagaccgtcctggctaatatggtgaaaccccgtctctactaaaaatacaaaaactagccgggcgtggcggcgtgcccctgtcccagctgctggggaggctgaggcaggagaatggcgtgaacccgggaggcggagcttgcagtgagccgagatcgcaccactgcactctagc

SEQ ID NO: 14410 - DNA, 201 bp, Homo sapiens
cactgcaagctccgccttccgggttcacgccgttctgctgatctcgtgatccgccccgcctcggcctcccaaagtgctgggattacaggcgtgagccaccgcgcccggccaacagttttcaatattaattattcagagtgtgtaataacttggaaaagggctttttttttcttttttgcttttagagacagggtctctggc

SEQ ID NO: 14411 - DNA, 201 bp, Homo sapiens
tgggagtgacccgattttcaaggtgcgtccgtcacccctttctttgactcagaaagggaactccctgaccccttgcgcttcccaagtgaggcagtgcctcgccctgcttcggctcgcacacggtgcacgcacccactgacctgcgcccactgtctggcactccctagtgagatgaacccggtacctcagatggaaatgcag

SEQ ID NO: 14412 - DNA, 201 bp, Homo sapiens
attccataaaaatgaaaattaaataagtacaagaatggttatatccgggggaggagccaacatggccgaataggaacagctccggtctacagctcccagcgtgagcgacacagaagatggtgatttctgcatttccaactgaggtaccgggttcatctcactagggactgccagacagtgggcgcaggtcagtgggtgcgt

SEQ ID NO: 14413 - DNA, 201 bp, Homo sapiens
cggggtttcaccctgttagccaggatggtctcgatctcctgacctcgtggtccgcctgcctcggcctcccaaagtgctgggattacagacctgaaccaccgcgccgggccagttctgtgggtttctaacgtgctttcttccacttgtaatttagagtcagaagaggctagcgctgacaggcaggcagtagtcacatgaaaa

SEQ ID NO: 14414 - DNA, 201 bp, Homo sapiens
ctactaaaaatacaaaaaattagccgggcgtggtggtgggcgcctgtaatcccagctactcgggaggctgaggcagaagaatggcatgaacccaagaggcggagcttgcagtgagccgggatagcgccactgcagtccagcttgggcgaaagagtgagactccgtctcaaaaaaaaaaaaaaaaaaaaaaaaaaaagactt

SEQ ID NO: 14415 - DNA, 201 bp, Homo sapiens
ggagggtggtgagggtggggagggggaaggcgggaggccgggttcggtgcatgggggccgggcacactttctctgggcatccctaggacaggcgaggaacgcatcggccgggactccacctacgagcaggagggcaaggtgcagtttgtgattgatgcggtgtacgccattgcccacgccctccacagcatgcaccaggcg

SEQ ID NO: 14416 - DNA, 201 bp, Homo sapiens
ctacacaagtcgtagtctgggcagacgctgcacttgtagcgggttcctaccacaggcccattgcagccatcgcagatcacattggggtgcaccatgttgcggggcgcctcctgagcacacggtgggcggtggtcccgccggcactcttttttctctacaggaagggtaaagagagccgctagggtgggaccccctaaagtc

SEQ ID NO: 14417 - DNA, 201 bp, Homo sapiens
tatggggaaaccctgtctctactaaaaatacaaaaattagcccggcgtggtggcacataactgtaaccccagctactcgggaggctgaggcaggagaatcgctggaacccgggaggcggagcctgcagtgagccaagattgcgccatgcactccaacctgggcgtcgcagcgagactctgtctctaaataaataaagtgcc

SEQ ID NO: 14418 - DNA, 201 bp, Homo sapiens
agcaatcaacaaagtgaagacatggcccactgaagcgcagaaaatatttacaagccgggcgcggtagctcacgcctgtaatcccagcactttgggaggccgagacacgcggatcacaaggtcaggagatcgagaccatcctggctaacacagtgaaaccctgtctctactacaaatagaaaaaattagttgggcatggtgg

SEQ ID NO: 14419 - DNA, 227 bp, Homo sapiens
agattggcttctttcacttaataatatgcatttcaatttctagggctgggcgtggtggctcacgcctgtaatcccagcactttgggaggccgaggccggcggatcacgaggtcaggagatcaagacgatcctggctaacatggtgaaaccccgtctctactaaaaatacagaaaataagccgggcgtggtggcgggcacctgtagttccagctactcaggaggctga

SEQ ID NO: 14420 - DNA, 201 bp, Homo sapiens
gttccctttccgagtcaaagaaaggggtgacggacgcacctggaaaatcgggtcactcccacccgaatattgcgcttttccgaccggcttaaaaaacggcgcaccacgagattatatcccacacctggctcggagtctcgctgattgctagcacagcagtctgagatcaaactgcaaggtggcagcaaggctgggggaggg

SEQ ID NO: 14421 - DNA, 201 bp, Homo sapiens
acgcagaagacgggtgatttctgcatttccatctgaggtaccgggttcatctcacttgggagagccagacagtgggcgcaggtcagtgggggcatgcaccgtgcgcgagccgaagcagggagaggcattgcctcacttgggaagcgcaaggggtcagggagttccctttccgagtcaaagaaaggggtgacagacgcacct

SEQ ID NO: 14422 - DNA, 201 bp, Homo sapiens
ggcacccgccaccacgcccggctaattttttgtattcacagtacagacggggtttcaccgtgttagccaggatggtttcgatctcctgacctcgtgatccgcccgcctctgcctcccaaagtgctgggattacaggcgtgagccaccgcgcccggtggaaaggacacttttttacagtatgagcactgaaacaaaaaggca

SEQ ID NO: 14423 - DNA, 201 bp, Homo sapiens
aaccgtgtcactggaagttaggaagcaaacttcaatcctagtattgtttttttttgaaatggagtctcgctctgtcacccaggctggagtgcagtggcgcgatctcggctcactgcaagctccgcctcccgggttcaccccattctcctgcctcagcctcccgagtagctgggactacaggtgcccgccaccacgcccggc

SEQ ID NO: 14424 - DNA, 201 bp, Homo sapiens
tctgggtgaccgtctgcaatggagggagtgtgtgggctggtttgccagcggagagatttgcctcacgtcaccaggagcctggccgagcaccacggtgaccgtggccgggtggaaggagatggacgcccacttgtgcaatttgcttccattctttctccaggggccatttcagaataaaatgtaatggccctttcttgttca

SEQ ID NO: 14425 - DNA, 201 bp, Homo sapiens
acaagctggctgcccggcaggccacaccggggtctctaagagcttgggctgcagacgaatccaggtctgcccctctcaatcagtgtgactcgggcaagccgcgtcccccctctgagcctcagtctcctcatctctcaaatgggggtgacgccatccccactgccaggggttcctctgagcgggtcacaggaaggtgcttag

SEQ ID NO: 14426 - DNA, 201 bp, Homo sapiens
cccagcctgggatcggcagtaccttcacctgcacgccatcctcagggacggcaatactgctcaccttgagcccagagcagctactatccccggcccctccgctggctttctgggaggtcccaggaagacgtgacctcttgtcaggcactcgtgggctcccccatagctgccggggtggttcttgcccctccaaaatcacac

SEQ ID NO: 14427 - DNA, 201 bp, Homo sapiens
aaagctaccgtaggtaatcagaaaagttgcttccattccatggctgtgtccacctgcggtagacaggataatggcccaaagatgtctgagacccgtgaccgtcttaccctgtgaccgtattaccccacatggcaaagaagcctctgtacgtgtgactacgattaaggaccttgagattcggagatgacctgggtatccggg

SEQ ID NO: 14428 - DNA, 201 bp, Homo sapiens
gtggcggcaggtttgctgcgctcgtcccagccagggcccagagtccctcggccagtttatcgcatctggaccccagatgggcgcgttgggtggtgcccgcgccagggaaagagctggcggctggctgagttgctgcgttcctgagcgctgtgcccgttgtgaccattggcgtggctgtctcccggcaggctcgaaggaatc

SEQ ID NO: 14429 - DNA, 201 bp, Homo sapiens
cccccgacatcctgcctctacactgcaccatccgccggcaaccgctcccggacagcggccaggccgcggggaggctggtcctggagcccatccccggggcgcacatctccgtcaacttctccgaggtggggcacaggaccgtggtgctgcaccacggggacctgctctccctggggctctactacctgctgctattcaagg

SEQ ID NO: 14430 - DNA, 201 bp, Homo sapiens
gggttcagaggcacttcagcaaatggtttaggaactgcagcattaatttatactgagaaatagaactgctacttaagaaagataactgccggcccaatgcggtggctcacgcctgtaatcccagcactttgggaggccgaggctggcggatcacgaggtcaggagatcgagaccatcctggctaacagggtgaaaccctgt

SEQ ID NO: 14431 - DNA, 201 bp, Homo sapiens
cacggtgaaaccctgtctctactaaaaatacaaaaaattagccaggtgtggaggcactccctgtaatcccagatactcaggaggctgaggcaggaaaatcgcttgaacccgggaggtggagtttgcagtgagctgatatcgcaccactgtgctccagcctgggcaacagagcaaaattctgtctcaaaaaaaaaaaaaaaa

SEQ ID NO: 14432 - DNA, 201 bp, Homo sapiens
cattctcctgcctcagccttaggagtagctgggactacaggcgtccgccacaacgcccggctaattttttttgtatttttagtggagacggggtttcaccgtgctagccaggatggtctcgatttcctgacctcgtgatctacccgcctcagcctcccaaagtgctgggattacaggtgtgagccaccgcgcccagctgtt

SEQ ID NO: 14433 - DNA, 201 bp, Homo sapiens
gtctacagctcccagcgtgagcgatgcagaagacgggtgatttctgcatttccatctgaggtaccgggttcatctcactagggagggccagacagtgggcgcaggtcagtgggtgcgcgcaccgtgcgccagccaaagcagggcaaggcattgcctcacttgggaagcgcaaggggtcagggagttccctttccgagtcaa

SEQ ID NO: 14434 - DNA, 201 bp, Homo sapiens
tggcaaaaccccatctctactaaaaatacaaagacttagtatgggcatggtggtgcacacctgcaatcccagctgcttgggaggctgaagcagaagaatcgcgtgaacccgggaggcagaagttgcagtgagccaagatcacgccactgcactccagcctgggtgacacaacgagattctgtctaaaaaacaaaataaaaa

SEQ ID NO: 14435 - DNA, 201 bp, Homo sapiens
aaatcttctatttctttgaggcagagtctcactctgtcgcccaggctggagtgcagtagcgtgatctcggttcactgcaagctccacctcccgggttcacgccattctcctgcctcagcctcctgagtagctgcgactacaggtgcccttcaccacgccgggctaattttttgtatttttagtagagacggggtttcactg

SEQ ID NO: 14436 - DNA, 201 bp, Homo sapiens
tcccgagtagctgggactacaggcgcccgccactacgcccggctaatattttgtatttttagtagagacggggtttcaccgcgttagccaggatggtctcgatctcctgacctcgtgatctgcctgcttcggcctcccaaagtgctgggattacaggcgtgagccaccgcgcccggcttattttttttatttttcacagag

SEQ ID NO: 14437 - DNA, 201 bp, Homo sapiens
tgagccgagcggagattgcgccactgctctccagcctgggtgacagagggagaccctgtgtctaaaaaaaatagatgcaggtaggagcttttcttccggcgctcatactcagactgaagaaagtaattgggctgggcccggtggctcagatctgtaattccagcactttgggaggcccaggcagacgtatcactttagctc

SEQ ID NO: 14438 - DNA, 201 bp, Homo sapiens
ctggagcagtggcaggtggcaagggctgggtggggggttgccccactgggctctctatttttctctccttcccccaactttttttttttttttttgagacggagtcttgctctgccactcaggctggagtaaagaggtatgatctcggctcacagcaacctctgcctcccgggttcaagtgactctcctgcctcatgctcc

SEQ ID NO: 14439 - DNA, 201 bp, Homo sapiens
tgaagggagggacgagagtcctaccatctaaccccaagcctagtggccggtgtccctggaagtggagacacatgctcactggtgtgcgactcacacttacgaaagggaacgtgccctctggaacacaggggagccctggtcagggaagccgtctttccacccaagagggacaaaggtgtgcaaatcccagaaaccagatat

SEQ ID NO: 14440 - DNA, 201 bp, Homo sapiens
aaatcatctctgatttgagatataaaaataaagaggccgggcgcaaggtggctcacgcctgtaatcccagcactttgggaggccgaggcgggcggatcacgaggtcagcagatcgagaccatcctggctaatacggtgaaaccccgtctctactaaacaaaacacaaaaaattagccgggcgtggtggcgggcgcctgtag

SEQ ID NO: 14441 - DNA, 217 bp, Homo sapiens
ttttgaatgaaattaggaaggagaaagtatgggacaatgggcttttgataatgataaaaagagaaaaaacaaatagaaaaaagaggagggtcggccgggcgcggtcaggaaggcgcggtctcggtcaggagatcgagaccatcctggctaacgcggtgaagccccgtctctactaaaaatacaaaaaattagccgggcgtggtggggggcgcctgta

SEQ ID NO: 14442 - DNA, 217 bp, Homo sapiens
ccgtcacccctttctttgactgggaaagggaactccctgaccccttgcccttcccaagtgaggcagtgcctcgccctgcttcggctcgcgcacggtgcacgcactcactgacctgcgcccactgtctggcactccctagtgagatgaacccggtacctcagatggaaatgcagaaatcacccgtcttctgcgtcgctcaagctgggagctgtagacc

SEQ ID NO: 14443 - DNA, 201 bp, Homo sapiens
tgctggtgggagttaaaatggatcaactacataaaaaacaatttccaggccgggcgcagtggctcacgcctgtaatcccggcactttgggaggccaaggcgggcggatcacgaggtcaggaaatcgacaccatcctggttaacaaggtgaaaccccatctctactaaaaatacaaaaatttagccgggcgtggtggcgggc

SEQ ID NO: 14444 - DNA, 201 bp, Homo sapiens
tggagatttcccacttattgtggcagcaaacccgtctgaggtgcctgcatgtctcagtcccggggctccgggggccgtgcccacagcctccccatctttcggctcccacgtcagggttcccggtccacaccgtgctgttctgcctcatatgagaccggaaagtcacatgtggataattcaggacttattcagggtcatata

SEQ ID NO: 14445 - DNA, 201 bp, Homo sapiens
gtagggtccgaacctcttccccaggagggccagggttgcggccgggcgacgccaggtggggaagacactagaagaggagaaaaccaggagcgcaggacgcggtgggagactgggaggctgcagagaggaggcctgaggacaggagggaaggaggcggggacagaggccgagggctggaggggctgccgggtcttctctggg

SEQ ID NO: 14446 - DNA, 201 bp, Homo sapiens
gccaccgcgcccggctaatttttttgtatttttttagtagagtcggggtttcaccgtgttagccaggatggtcacgatctcctgaccttgtgatccggccgcctcggcctcccaaagtgctgggattacaggcgttaagccaccgcgcccggccgatagtcagactcttaaaggtgtttgaatttttccaatgtggaaaca

SEQ ID NO: 14447 - DNA, 201 bp, Homo sapiens
agctcacgcacggtgcgcgcacccactgacctgcacccactgtctggcactccctagtgagatgaacccggtacctcagatggaaatacagaaatcacccgtcttctgcgtcgctcacagtgggagctgtagaccggagctgttcctattcggccatcttggctcgatccggagtggcacacgcttctaaacaaccaaatc

SEQ ID NO: 14448 - DNA, 201 bp, Homo sapiens
ctggcgagaagtcgagcacagcagctgctggcccaggtgctaagcccctcactgcccggggctgctggccgctccaagtgcgggccagcccagcccacgcgcacccggaagtcgcgctggtgagggagggctgcgagggctgccagcatgctatcacctctcactgggattacaggcgtgagccacggcgcccggccgaag

SEQ ID NO: 14449 - DNA, 201 bp, Homo sapiens
tcacgccattcttctgcctcagcctgtagctgggactacaggtgcccgccaccacgcccggctactttttctgtatttttaatagagacggggtttcaccgtgttagccaggatggtctcaatctgctgatctcgtgatccgcccgcctcggcctcccaaagttctgggattgcaggagtgagccaccgcgcccggccgca

SEQ ID NO: 14450 - DNA, 201 bp, Homo sapiens
cagactggagtgcagtggcacgacctcggcttagaacctccgcctcatgggttcaagcaattcccctgcctcagcctccggagtagctgggactacaggcgcccgccaccacgccaggctaattttttgtatttttagtagggacggctgaccgggcgcggtggctcacgcctgtaaccccagcactttgggaggccgagg

SEQ ID NO: 14451 - DNA, 201 bp, Homo sapiens
cacttcccagatgggatagcggccgggaagaggcgctcctcacttcctagatgggatggcggccaggcagagacgctcctcacttctcagacggggtggcggccgggcagaggctgcaatctcggcactttgggaggccaaggcaggctgctgggaggtgaaggttgtagcgagccgagatcacgccactgcactccagcc

SEQ ID NO: 14452 - DNA, 201 bp, Homo sapiens
gatggagctgcctgccagtcccggtactgtgcgcccgcactcctcagcccttgggtggtcaatgggactgggtgccgtggagcagggggtggcgctcgtcggggaggctcgggccgcacaggagcccacggaaggggtgggaggctcaggcatggcgggctgcaggtcccgagccctgccccgcgggaaggcagctaaggc

SEQ ID NO: 14453 - DNA, 286 bp, Homo sapiens
gagccaggtgtgggatatagtctcgtggtgcaccgttttttaagccggtctgaaaagcgcaataatcgggtgggagtgacccgattttccaggtgcgtccgtcacccatttatttgactcggaaagggaactctctgaccccttgcgcttcccaggtgaggcaatgcctcgccctgcttcggctcgcgcacggtgcgcgcacccactggcctgcgcccactgtctggcactccctagtgagatgaacccggtacctcagatggaaatgcagaaatcacccgtcttc

SEQ ID NO: 14454 - DNA, 201 bp, Homo sapiens
aggcaaagctgcctgccagtcccatgccttgtgcccacgctcctcagccgttccacagtcgatgggaccgggtgccatggagcagggggcggtgctcgtcggggaggctcctgctgcacaggagcctagggcagtggggggaggctcacacatggcaggctgcaggtcccaagccctgccccgcagggaggcagctgaggc

SEQ ID NO: 14455 - DNA, 201 bp, Homo sapiens
aggcgggtggatcacgaggtcaggggttcgagacgagcctggccaacatggtgaaactccgtctctactaaaaatacaaaaattagttgggcgtggaggcgcgcgcctgtaatcccagatactcgggaggctgaggcaagagaatcgcctgaacccgggaggcggaggttgcagtgagccgagatggtgccattgcactcc

SEQ ID NO: 14456 - DNA, 201 bp, Homo sapiens
gagcgacgcagaagacgggtgatttctgcatttccatctgaggtaccgggttcatctcactagggagtgccagacagtgggcgcaggtcagtgggtgtgcgcaatgtgcgcgagccgaagcagggcgaggcattgcctcactcgggaagcgcaaggggtcagggagttccctttccgagtcaaaggaaggggtgacggagg

SEQ ID NO: 14457 - DNA, 201 bp, Homo sapiens
gtgccgtctgtcacccctttctttgactaggaaagggaactccctgaccccctgcgcttccggagtgaggcaatgcctcgccctgcttcagctcgcacacggtgcatgcacccacggacctgcgcccactgtctggcactccctagtgagatgaacccggtacctcagatggaaatgcagaaatcacccgtcttctgcgtc

SEQ ID NO: 14458 - DNA, 201 bp, Homo sapiens
atcttcatttgaattctgacagcagctactatgtagagctgttaaaatgtatacttccggccgggtgcggtggctcacgcctgtaatcccagcactttgcggggccgaggcgggcggatcacgaggtcaagagatcaagactatcctggccaacatggtgaaaccctgtctctattaaaaatataaaaaaaattagctggg

SEQ ID NO: 14459 - DNA, 201 bp, Homo sapiens
ccaggtgccatccgtcacccctttccctgactcagaaagggaactccctgaccccttgcgcttcccaggtgaggcaatgcctcgccctgcttcggctcgcgcacggtgcgcacacacactggcctgcgcccactgtctggcactccctagtgagatgaacccggtacctcagatggaaatgcagaaatcacccgtcttctg

SEQ ID NO: 14460 - DNA, 201 bp, Homo sapiens
ttcagcccaccgctgcactgtgagagcccctttctgggctggccaaggccagagcccgctccctcagcttgcagggaggtgtggatggagaggcgtgagcgggaacccaggctgtgcatggtgcttgcgggccagctggagttccgggtgggcgtgggcttggcaggccccgcactgggagcagccggccggccctgccag

SEQ ID NO: 14461 - DNA, 201 bp, Homo sapiens
ggggagagggactgaccccttgtgctccacccccagctcatccaaccccagtgcagcctggagactgccaccgtgccccccggagggcgatggagcctccgctctgctcaggagcagcctggcttccgggagggcagcctgactcccacggcactgccggtgacccctcagctcaggccccggggctgcgagaatctcaag

SEQ ID NO: 14462 - DNA, 201 bp, Homo sapiens
atgagcgtcaccgacggcagagtcgccttctccatgttctgtggggaccgggaagagaccgcagggagtgaggcaccccactcgcccactcggcagacccgaagactgagacccgagagcccgcagccccgggtcacacccccagcgtttggcccagcccctcctccacctccccacccgccccctgcagacgaggggttt

SEQ ID NO: 14463 - DNA, 201 bp, Homo sapiens
gttgtaactttactgagtgtgcctgtctaccagacacctgatcttgcaagactgctttttttttttttttttgacggagtctcgctctgtcgcccaggccgaagtgcagtggcgcgatctcggctcactgcaagctccgcctcccgggttcatgccattctcctgcctcagcctcccgagtagctgggactacaggcgccc

SEQ ID NO: 14464 - DNA, 210 bp, Homo sapiens
ttctgggttcccacttcttttttttttttttttttttttctgagacgaagtctcactctgtcgcccgggctggagtgctgtggcaggatctcggctcaccgcaagctccgcctcccggattcacgccattctcctgcctcagcctcccgagcagctgggactagaggcgcccgccaccgcgccaggctaatttttttgtatttttagtag

SEQ ID NO: 14465 - DNA, 201 bp, Homo sapiens
caagctgggcgcggtggctcacgcctgtaatcccagcactttgggaggcccaggcaggcggatcacgaggtcaggagatcaagaccatcctggctaacacggtgagaaccccgtctctataaaaaatacaaaaaattagccgggtgcctgtagtcccagctactcgggaggctgaggcgagagaatggcgtgaacccgggg

SEQ ID NO: 14466 - DNA, 201 bp, Homo sapiens
gggttaaagaggaatcggaaagggcccggggtagacgtgggcgccacagggtgagccgggccaggctgagaggactcacgggctatgggagcttgtgggcgacggtccggcaggggcctgcggcgggaacagggacaaaatatacttaataaattgcccatttagagcaagttgtgtgggtacaatggcgagaaaacggtc

SEQ ID NO: 14467 - DNA, 201 bp, Homo sapiens
ggcgggtgggtcacgaagtcaggagatcgagaccatcctggctaatatggtgaaaccccatctctactaaaaatacaaaaaattagcctggcacagtggcgggcgcctgtagtcccagctagcccggaggctgaggcaggagaatggcgtgaacccgggaggcggagcttgcagtgagccgagattgcgccactgcactac

SEQ ID NO: 14468 - DNA, 201 bp, Homo sapiens
gttcatgccatcctaacagtgggtttttccccggtgagaactggccaacagtcattgcctcgcctctttagtatgttgtttgaccagagagggacagggcggggaggaaaaccggggcgccgtgggctgcagttccagctgcaaatacgggagtttcttccgacgtctgtggcccgccggctcgaaagggagaaacacgga

SEQ ID NO: 14469 - DNA, 201 bp, Homo sapiens
tcatgaactcctgagctcaagtgatccccccacctggccttgcgaagtgctgggattacatgtgtgagccaccacgtcgggattacaggtgtgagccaccgcgccgggattatgggcatgagccactgcgccggcctctagtaaacattttatcagtatccagtgaattctgggtctttgtggaacaggaatgtttgttcc

SEQ ID NO: 14470 - DNA, 201 bp, Homo sapiens
aggctgaggctggtggatcacaaggtcaggagatcgagaccatcctggctaacatggtgaaaccccgtctttactaaaaatacaaaaaaattagccgggcgtggtggtgtgcacctgtagtcccagctactcgggagcctgaggcaggagaatggcatgaacccgggaggcagagcttgcagtgagccaaaattgcaccac

SEQ ID NO: 14471 - DNA, 201 bp, Homo sapiens
aaggagatgcctgggccaggactgaagtctcccggaacaacgggctgggaccctgaggctggcaggggtgcagtgggcactgggtccatgtgtggcttgcgctggccgacgtgggcacacaaggggcacagctgccactgggggcctggaggggaggacccagctggggtctggagggccaggattttgcagaaggtttac

SEQ ID NO: 14472 - DNA, 201 bp, Homo sapiens
catggtgaaaccccgtctcaactaaaagtactaaaattacctgggcatggtggcacatgcctgtaatcccagctactcgggaggctgaggcaggagaatcgcttgagcccgggaggcggaggttgtagtgagccgtgatcgcgccactgcactccagcctgggcgatagagcaagactccatcttaataaaaaaattaaaa

SEQ ID NO: 14473 - DNA, 201 bp, Homo sapiens
gcgattctcctgcctcagcctcccgagcagctaggactacaggcgcccgcccccacgcccggctaattttttgtatttttggtagagacggggtttcaccgtgttagcaaggatagtctcgatctcttgacctcgtgattcgcctgcctcggcgttccaaagtgctgggattacaggcatgagccaccgcgcctggcgggg

SEQ ID NO: 14474 - DNA, 201 bp, Homo sapiens
agtgaaacccctctctactaaaaattcaaaaaaattagccgggtgtggtagcatgtgcctgtagtcccagctactcgagaggttgagacaggagaatggcgtgaacccgggaggcggagcttgcagtgagccgagatcgtgccactgcaccccagcgtgggcgacagagcaagactccgtctcaaaaaaaaagaaaataat

SEQ ID NO: 14475 - DNA, 201 bp, Homo sapiens
agatcatagatgaatttgaatcccaagtagcacagatgcgtcacacccatcatcctgccgctgaccatccccgggaccacatcacacccatcatcccgccgctgaccatccccgggaccaccatggcgggtcatgacagcacgtccttcctagaaacacgtctgaatagtacaagaaaaggacaccacccggattcgcgga

SEQ ID NO: 14476 - DNA, 201 bp, Homo sapiens
cgctgccacctacaagagctcctcctcccttgcaaccaatggccttgttcctggcttgtccagcaaactgaaaccatcgaaaaaggactttgccgggagcggtggctcacgcctgtaataccagcactttgggaggccgaggcgggctgatcacaaggtcaggaaatcgagaccatcctggctaacacggtgaaacccagt

SEQ ID NO: 14477 - DNA, 201 bp, Homo sapiens
ccagagccaggcgcctatcgtcaacccggagtgtgtgctccagccctctggggtcgaccctggttgctgggtcagtagtgtgaatctcctctcctcacacggggcccctaagacacgtgtttgtgtgtgtccgtccctaagacacgtgtgtgtgtatatgtgtgtgtgtgtgtgtgttccacatgaacgatttgagtcacc

SEQ ID NO: 14478 - DNA, 201 bp, Homo sapiens
gccagtgccttcacggcagcccctgcactgggcccggggtgggggcggggggtggttgtggagtccctggctttcacccagcgtgtctccttcacggggcgcaccccaaagcgacaagatgtttcccaggaaatggggaatggacgccaggctttcagggagaggttgaggcagcctgaggtaaaaagggacgggccgagg

SEQ ID NO: 14479 - DNA, 201 bp, Homo sapiens
gggtgttcatggagtccctagctttcacccagggtgcgtgtcttccccacggggggcaccccaaaggggcatgaagtttcccgggggatggggatatgacgccaggctttcagtgggacactgagacagccgggggaaaaaagccgggagggcaagaaggctggggcacttccatggaggccagttccttcccagcagcct

SEQ ID NO: 14480 - DNA, 201 bp, Homo sapiens
gcacccactgtcctgcaccaactgtccagcactccccagtgagatgaacccgttacctcagttggaaatgcagaaatcacccatcttctgcgtcgctcacgctgggagctgtagaccggagctgttcctattcggccatcttggctccaccccaccacattttctttatccagtctatcattgatggatatttgggttggt

SEQ ID NO: 14481 - DNA, 201 bp, Homo sapiens
gcaggtgccagggagaggcaacttcccaaacagataaaaacacttctggccgggcgcggtggctcatgcctgtaatcccagcacttcgggaggccgacgcgggcggatcacgaggccaggagatcgagaccatccttgctaacacggtgaaaccccgtctctattaaaaatacaaaaaattagccgggtgtggtggcgggc

SEQ ID NO: 14482 - DNA, 201 bp, Homo sapiens
tggtttcaccatgttagccaggatggtctcaatctcctgacctcgtgatccgcccgccacggcctccgaaagtgctgtgattacaggcatgagccaccgcgcccggcctaaaataactcttgaggttacataagaacatagtttatgtttacttatagctgtatctaatctaattaagaacttgttccttaagatgaaaaa

SEQ ID NO: 14483 - DNA, 201 bp, Homo sapiens
cgggctcccgacttgcgtggatgagcagttctgagccttacacagggcgggtgacgctgcagactgacaaggcccatccctggccacactgagccaaagcggaaggggtgcaggtgtggagtgccatgtgcgatgccactgccggccagctggagtggaggtgcccgccatgtgcatggggagacgtgcccctggttagcc

SEQ ID NO: 14484 - DNA, 366 bp, Homo sapiens
ccgccttgcagtttgatctcagactgctgtgctagcaatcagtgagattccgtgggcgtaggaccctccaagccaggtgtgggatatagtctcgtggtgcgccattttttaagccggtctgaaaagcgcaatattcgggtgggagtgacccgattttctaggtgcgtcggtcacccctttccttgactcggaaagggaactccctgacccctggcgcttcccaggtgaggcaatgcctcgccctgcttcggctcgcccacggtgcgcgcacccactggcctgcgcccactgcctggcactccctagtgaggtgaacccggtacctcagatggaaatgcagaaatcacccgtcttctgcgtcgctca

SEQ ID NO: 14485 - DNA, 201 bp, Homo sapiens
ggctcctgcagggccgagcctccccaatgagcgctgccccctgctccacggcgcccggtcccatcgaccgcccaagggctgaggactgtgggagcactgcgcgggactggcaggcagctccacctgcggcccccggtgcgggatccactgggtgaagccagctgggctcgtgagtctagtgtggacttggagaacctttat

SEQ ID NO: 14486 - DNA, 201 bp, Homo sapiens
cgcagaagatgagtgatttctgcatttccatatgaggtaccgggttcatctcactagggagtgccagacagtgggcgcaggacagtgggtgcagcgcaccgcacgcgagccgaagcagggcgaggcattgcctcactccggaagcacaaggggtcagggagttccctttcctagtcaaagaaaggggtgacagacggcacc

SEQ ID NO: 14487 - DNA, 201 bp, Homo sapiens
ttccctttcccagtcaaagaaaggggtgacagacagcacctggaaaatcgggtcactccaaccggaatactgcacttttccaacaggcttaaaaaacggcgcacctggagattgtatcccgcacctggctcggagggtcctatgcccacggagtctcgctgattgctagcacagcagtctgagatcaaactgcaaggcggc

SEQ ID NO: 14488 - DNA, 384 bp, Homo sapiens
ttcgtttctttggcctctgttgcccatgagaaatgaggaaaaataaaggccagattcctaataaccttcccggaagaaagagctgttttgagtgggtgtcggtgcttacatacgctgcttttaaaaaaatttgctttgttcaggtttgtgtgaatacaacgccggatgaactctgtcccttcagaagaaagccgggttggtgtgctcgatgacgcagcgcttgcagtggcgtttgacaaagcgcagggcctccacggagacctcgcagtcctggacattcagcgtctggaggtcaaagcagttggcggccacgatctgcaagccctggccggtgatgctctcgcaggacttgaggctgagccgcttgaggttgaagcagttcag

SEQ ID NO: 14489 - DNA, 216 bp, Homo sapiens
tgggagtgacccgattttccagctgcgtccatcacccctttctttgactcggaaagggaactccctgaccccttgcgcttcccaggtgaggcaatgcctcgccctgcttcggctcgcgcacggtgcgcgcacccactggcctgcgcccactgtctggcactccctagtgagattaacccggtacctcagatggaaatgcagaaatcacccgtcttc

SEQ ID NO: 14490 - DNA, 334 bp, Homo sapiens
ctgtgctggcaatcagcgagactccgtcgggtaggaccctccgagccagatgcgggatataatctcgtggtgcgccgttttttaggccggtccgaaaagcgcaatattcgggtgggagtgacccgattttccaggtgcgtccgtcacccctttctttgactaggaaagggaactccctgacccctggcgcttcccgagtgaggcattgccttaccctgcttcggctcgcgcacggtgcgcgcacccactgacctgtgcccactgtctggcactccctagtgagatgaacccggtacctcagatggaaatgcagaaatcaccgtcttctatgtca

SEQ ID NO: 14491 - DNA, 201 bp, Homo sapiens
ctcgatgcaaggcggggcaggcaaaagcccggcagccatccgagaaggtgtgatcaaaacggaggaacccgagagactcctcgaggactgcaggctcggcgcggagcccgcgtccaatggcctggttcatggcagcgcggaggtcatcttggccccaacgtccggtgcctttgggccgcaccagcaagaccttaggatccc

SEQ ID NO: 14492 - DNA, 270 bp, Homo sapiens
ccccggttcccgcccgtgcctctccctccacacctccccgcaagctgagggagccggctccggccttggccagcccaggaatgggcttccacagtgcagcggcgggctgaagggctcctcaagcgcggccagagtgggtgccaaggccgaggaggcgccaagagcgagcgagggctgtgagggctgccatgccggtacactgtcacttctcagaaggacgcagggcagagtttcaggctggctctgtcacccatgctggagtgcagtggc

SEQ ID NO: 14493 - DNA, 253 bp, Homo sapiens
ggtcggaaaagcgcagtattccggtgggagtgacccgattttccaggtgcgtccgtcacccctttctttgactcggaaacggaactccctgaccccttgcgcttcccaagtgaggcaatgcctcgccctgcttcggctcgcgcacggtgcgcgcacccactgacctgcgcccactgtctggcactccctagtgagatgaacccggtacctcagatggaaatgcagaaatcacctgtcttccacgtcgctcacg

SEQ ID NO: 14494 - DNA, 204 bp, Homo sapiens
taaattagtaaactcaacacttcaggatctttgttaagaagcttggttttggccgggaggatggagttcagcgggcagcggagctgtctcagtctttgccgccgccccgtccgggagggaggtggggggggtcagcccccctgcccggccagccgccccgtccgggaggtgaggggcgcctctgcccggccgcccctactggga

SEQ ID NO: 14495 - DNA, 228 bp, Homo sapiens
actcgggaagcacaaggggtcagggagttccctttcctggtcaaggaaaggggtgacagacagcacgtggaaaatcaggcctctcccacccgaatactgcgcttttcctacgggcttaaaaaccggcgcatcaggagactatatcccgcacctggctcggagggtcctacgcccacggagtctcgccgattgctagcacagcagtctgagatcaaactgcaaggtagc

SEQ ID NO: 14496 - DNA, 217 bp, Homo sapiens
cccagtggccgcaggggctgtcgtgtgctttgcagatggacacgcgctatttaacatagagatgcgctgagtccgggtgattagtgaatcgcacgtcatcgcagacactagaaagcgaaagcatacgggggaaggccccgggcacagacccagcacggccaccactcgagctggagctgcctgcgagacgatgagcgtctgcaatctgcatcctgcg

SEQ ID NO: 14497 - DNA, 201 bp, Homo sapiens
tccggtgtttaacccctgaattctaaggaaaaatagggcagaatagaaagtgaaacaggtccgaaggtactcaccgtgtggcaatatcccagacgagtccgatggtactcaccgtgtggcaatatcccagacgaacacccaagatgtgtccggagttggttccttccagtgggcttgtggtctcagtgacttcaagaatga

SEQ ID NO: 14498 - DNA, 204 bp, Homo sapiens
acggtgcgcacacccactgacctgtgcccactgtctggcactccctagtgagatgaacccggtacctccgatggaaatgcagaaatcacccattttccgcgtcgctcacgctgggagctgtagaccggagctgttcctatttggccatcttggctcctccccggcatttttcttactttttatttaggaccagtttgttgtctt

SEQ ID NO: 14499 - DNA, 223 bp, Homo sapiens
tagaagtacaagtaaccgtttccctctgcatcccagtggaacgtcgtgggtcttctgaagaccctctcttgccctgcaggctccggtactccaagcacgcgagtctgcgcaggaggcgcttcgctctccggagctccccactgcctcctagacacagtcccggctccttaccccgggcggaggctcttccagacgggtcccgactgcctctgtatgcccactg

SEQ ID NO: 14500 - DNA, 201 bp, Homo sapiens
tactcacaaggctgaggcaggagaattgcttgaagccgggaggcggaggctgcaatgagccgagatcacaccattgcatcccagcctgggcgacaagagcgaaactctgtaacaacatcaacaacaacaacaaaacaaaaacaaaaacaaaaaagaaaacaagagacgcggtggttctgcttgtaatcctagtactttggg

SEQ ID NO: 14501 - DNA, 203 bp, Homo sapiens
cctaatatcaagctaggtctagggaagtgctttttttttttttttttttttttatttgagacgtagtctcactctgtcacccaggctggagtacagtggcgcgatctcggctcactgcaagctccgcctcccgggttcacgctattctgctgcctcagcctcccgagtagctgggactaccgcccgaccaatttatttgtact

SEQ ID NO: 14502 - DNA, 201 bp, Homo sapiens
tacaaaaagaactacaaaacactgctgaaaaaaatcagacaacagccgggcgcggtgtctcatgcctgtaatcccagcagtttgggaggccgagttgggcggatcacgaggtcaggagacccagaccatcccggctaacacggtgaaacctcggtgaaacctcgtctctactaataatacaaaaaaattagccgggcgtgg

SEQ ID NO: 14503 - DNA, 201 bp, Homo sapiens
accattgttaaaaattaaattgggccgggcgcggtggctcacgcctgtaatcccagcactttggggggccgaggctggcggatcacgaggtcaggagatcgagaccatcctggctaacacggtgaaaccccatctctactaaaaatacaaaaaattagccgggcgaggtggcaggcacctgtagtcccagctactcgggag

SEQ ID NO: 14504 - DNA, 201 bp, Homo sapiens
tctgttctgattttgtttgtgggtgtcgggatatttgggtgcagagggtttgtgcccagttagaagcgacttttgttctcttctgcgtaggcgttggtgcgtccgccgcgtgtgcgtggtccgtgtgccgttgctccggcctgcgtctccatatgtgtaggaaaggacacgccgtctgtcctcacgccccctgtgactttt

SEQ ID NO: 14505 - DNA, 201 bp, Homo sapiens
gaggctgaggcaggagaatcatgtgaacccggaaggcggagcttgcagtgagccgagatcgcgccactgcactccagcctgggcgacagagcgagactccgcctcaaaaaaaaaaaaaaaaaaaaaaaaagtgacctgggccgggcgcggtggctcacgcctgtaatcccagcactttgggaggccgaggagggcagatca

SEQ ID NO: 14506 - DNA, 201 bp, Homo sapiens
tactagccaggcatggtagcacatgcctgtaatcccagctactcgggaggctgaggcaggagaatcgcttgaacccgggaggtggagattgcagtaagccgagttcgtgccatcctattccagcctgggcaagagcgaaactccactgggaaaaaaaaatccatagtttaggccgggcgcggtggctcacgcctgtaatcc

SEQ ID NO: 14507 - DNA, 201 bp, Homo sapiens
ggtcagccccccgcccggccagccgccccatccgggaggtgaggggcgcttctgcccggccgcccctactgggaagtgaggagcccctctgcccggccacgaccccgtctgggaggtgtgcccagcagctcattggggatgggccatgatgacaatggcggttttgtggaatagaaaggcgggaagggtggggaaaaaatt

SEQ ID NO: 14508 - DNA, 201 bp, Homo sapiens
actggccaaagagcactgtgggttctcggaagcacctgctcttccatcagctgtaaaccggaatgataaccagctcctaggctttggtttctgaatgtacgctgcgaacgatgcactgccttggcctcatggcaggggctggggaggcccgctctaccctgtaccccgacccgggcccaaagctgagcttgaagggccccc

SEQ ID NO: 14509 - DNA, 201 bp, Homo sapiens
cccgccactacgcccggctaattttttgtatttttagtagagacggggtttcaccgttttagctgggatggtcccgatctcctgacctcgtgatctgcccgcctcggtctcccaaagtgctgggattacaggcgtgagccaccgcacccggccccccctttttttttttttttttaagacagagtctcactctgctgccca

SEQ ID NO: 14510 - DNA, 201 bp, Homo sapiens
atctcggaaagtacaggaggtcatgccccagtgtggttcccctttcctgggtttaagtcaaggtcctcaccgtgcctgccggcctcccgggtctctgcgcggtggactctggacctccctgccccgtcctgcctcagggcctttgcacctgctgttaccgcggcctggaacgctcctcccctgaaaccctgtgactcccac

SEQ ID NO: 14511 - DNA, 201 bp, Homo sapiens
tgtgcttataagaacactagccattggatttagggcccacctaactcagtatgacctcatcttaacttgattacatctgaaaagacccttggccgggcgcggtggctcatgcctataatcccatcactttgggaggccgaggcaggtggatcacttgaggtcaggagttcgagaccagcctggccaacatggggaaatccc

SEQ ID NO: 14512 - DNA, 211 bp, Homo sapiens
cccagctctcaggacgtgcctcccatggctttctctgcggtgtggccacgcccggacttccttggcaccccccacctgccccgcacgacctgccctgcgcgacctgccccgcaaggccggggggagcgtcttcctcccccgcgacctcttacctcctcccggcactcgcccaccccgctgcccaggtctcctgctcctccggccctagggc

SEQ ID NO: 14513 - DNA, 201 bp, Homo sapiens
gtgcgcgcacccactgacctgcgcccactgtctggcactccctagtgagatgaaccgggtacctcagatgcaaatgcagaaatcacccgtcttctttgtcgctcacgctgggagctgtagaccggagctgttcctactcggccatcttggctcctccccccgaaaagagtatctttcaaccaagaagatggctttggctgc

SEQ ID NO: 14514 - DNA, 201 bp, Homo sapiens
acctagtggatcccacaccggggctgcaggtggagctgcctgccagtcctgcgccgtgtgctcacattcctcagcccttgggtggtcgatgggactgggcgccgtggagcagggggtggcactcgtccgggaggcttgggcggcacaggagcccatggagtgggtgggaggctcaggcatggtgggctgcaggtcctgagc

SEQ ID NO: 14515 - DNA, 201 bp, Homo sapiens
gatatgtacaggccatttaagagaatgatcgacttctggccacccggtgcctgcctgctgcggtggcgctgtgccgggcccaggggtcccagggactcccgccgtgctgtcagccttggaatctcagtggggacctgttgtgtggaaacttccggacaacagtctttcccatggagaacctacgtcttcacaatgttacca

SEQ ID NO: 14516 - DNA, 201 bp, Homo sapiens
ccactccttcatatctgtagagcgctctaccttctgtaacgtttatctgcgaaactgctgcgttaggccaggagcactccaagagcgagaggcagacgccgtctgacttttcaccctgacaggggacttttccacctggcagtgccaatatccggctcctacgcattctccatggaggatcaccaggtcagcccatgggag

SEQ ID NO: 14517 - DNA, 201 bp, Homo sapiens
ttctggcagagtcagcactcgactctccctgctcggagacccaggcgacggtgccgtgtgacccctgaccccgcggatgaggaaggtagagagagagcgcgcagacacggaggtcggcgctgaggttgagggagccacacccggccgcaagcttgagggagggaagccgggtgcggaaacagcccagcgggtccagaagtc

SEQ ID NO: 14518 - DNA, 201 bp, Homo sapiens
ccgctgccacgcccagctaattttttgtattgtttagtagagacggggtttcaccgtgttagccaggatggtctcgatctcctgaccttgtgatctgcccgcctcggcctcccaaagtgctgggattacaggcatgaaccaccgcacccggccaacctagtggttttgaggaggactcgtcaggagttttgtaaaatgtcc

SEQ ID NO: 14519 - DNA, 201 bp, Homo sapiens
accggatggacgtctgctgctgctccatcggggccgtgtggggagtcgagtgcgaggcctgcccggatcccgagtctctggagttcgccagcctgtgcccgcgggggctgggcttcgccagccgggacttcctgtctggccgaccattctataaaggtgcggttggggaaggggtcaggcccctggaaggatggggagggg

SEQ ID NO: 14520 - DNA, 201 bp, Homo sapiens
ttacaggtgtgagccacccggcctttttttttttttttttttttttttgagacgaagtctcactcttgtcccccaggctggagtgcaaaggcgcaatctcggctcactacaacctccacctcccgggttcaggcaattctcctgcctcaacccctggagtagctgggattacaggtgcctgccaccaggcctggctaattt

SEQ ID NO: 14521 - DNA, 201 bp, Homo sapiens
atcacccggcccagcaggtagaggcgcaggaacatggggatggacagcagcacgtccacgtcggcctcggccaccgagggcgcgtacgtgaaggccagccgcgccgtccacgtgaagcggtagtggccgggcaccgggtgaatggcgcacactgccagctctagcgagatgaggaacacgcgctcgcaggtcatggcgatg

SEQ ID NO: 14522 - DNA, 201 bp, Homo sapiens
gtagtcccagctactccaaaggcagaggtgagaatcgcttgaacccggaaggagtaggtttcagtgagctgaggtcatgccacttccctccagcctgggcgacagagaaagactctgtctagaaaaagtaaattatgggagtcggcgccggcgagcgccgcccgggaggcagcggctggaggagcggacgggccccgcggg

SEQ ID NO: 14523 - DNA, 201 bp, Homo sapiens
gaggctgaggcaggagaatggcgtgaacccgggaggcggagcttgcagtgagccgagatcccgccactgcactccagcctgggcgacagagcgagactccgtctcaaaaaaaaaataaaaataaaaataaaataaaataaaaaatgagctgggcatgatggcacaagcctgtggtcccagctactcaggaggctgaggtgg

SEQ ID NO: 14524 - DNA, 201 bp, Homo sapiens
gcagcttaataattctgcgttgcaaatttaaatattttacatatcattagacattaaaaacaaagatttatgctgctcgtctccacggagtgaggactccgttgacttcacacccggccatgaatctgcttgaggttcattagctgaacgtcttcggctaagaaagcccgtcgagtgggggcggcctctaaatcaccattt

SEQ ID NO: 14525 - DNA, 201 bp, Homo sapiens
gtgcatcttggctcactacaacctccaccacacccgcctctcccaggcttaagtgaccctcccacctcagtctccctagtagctgggactacaggtgcacggcaccatgaccggctaatttttgtattttttgtagagatgggattttgccatgttacccaggctggtctcgaactcctaagctaaagtaatccgcctgcc

SEQ ID NO: 14526 - DNA, 201 bp, Homo sapiens
ccccatctctactaaaaatacaaaaaattagccaggcgtggtggcacgccctgtaatcccagctactcgggaggctgaggcaggagaattgcttgaacgcgggttggggaggttgcggtgagccgagattgcaccactgcactccagcccgggtgacagtgcaagactccatctcaaaaaaaaaaaaaatctgtcaatcta

SEQ ID NO: 14527 - DNA, 201 bp, Homo sapiens
cacgtactacccacatgagccttcagtaggctccggccctaaataggcacatgcgtatttccccagctccttactgggatcctcccgctaagccacgcccgatgcccttgtctacagccatgagctgcagtaagatgcccaggcccggtgccagcgtgcgcagcacgtgtgccagcaccgtggaatccttgccgcccgagg

SEQ ID NO: 14528 - DNA, 201 bp, Homo sapiens
tggcactttggaaggccgacgtgggggcatcacctgagatcaggggttcgagaccagccttgcgaacgtgatgaaaccccgtctctactgaaaattcaacgattagccgggggtggtggtgcatgcctgtaatcctagctactcaggaggctgaggcaggagaatcgcttgaacccggaaggtggaagttgcaatgagccg

SEQ ID NO: 14529 - DNA, 201 bp, Homo sapiens
ctgaggtgggccgggcgcggtggctcacgcctgtaatctcaacactttgggaggccgaggggggtggatcacctgaggtgggcccggcgtggtggctcacgcctgtaatctcaacactttgggaggctgagaggggtggatcacctgaggtgggccgggcgcggtggctcacgcctgtaatctcaacactttgggaggccg

SEQ ID NO: 14530 - DNA, 201 bp, Homo sapiens
ggggtctcggccaggggtgggtgaggctggtgcccttccaggctcccctcagccacaggcagcaggtgccatgggagccctgccggcacccccttcctccgccagggtcctggttcatctgatggcgcagctcccctctaaggtgtgcaccggcgcagacactgtgcaggaagccaggctgatgcagacggttctcaagtc

SEQ ID NO: 14531 - DNA, 201 bp, Homo sapiens
aaagttgcccaaagtcccacaatgagttgatccaccgggaacaggaggaggccccgccgccagcctctgtgttatacttggcatctcgtccaggtttatcggagaggagatcacacgtcccttccccagccctcccaactcctccagccaagacaggtgccaccatctaccccagccccagtgtgctctgagtgtgccgga

SEQ ID NO: 14532 - DNA, 201 bp, Homo sapiens
cattctcctgcctcagcctcccgagcagctgggactacaggcgcccgccactgcgcccggctaattttttgtatttttttagtagagacggggtttcaccgtggtctcgatctcctgacctcgtgatccgcccacctcggcctcccaaagtgctgggattacaggcgtgagccaccgcgcccggccgtgtgtgttttttaa

SEQ ID NO: 14533 - DNA, 201 bp, Homo sapiens
gcacgtggcagcaggacttacctctggggtgccccgggtcggtgaactcatacttccccacgccaatggtccgcagcatctgcagcccgtgggccgagtcggttgtggggggcccattggtggcaggggcaccactggggagagtggcggacggctgggctggcggcggtggaggcagcaggggccctgccatgtggccgt

SEQ ID NO: 14534 - DNA, 279 bp, Homo sapiens
ggtggaagagctgacagcaaggggagtggccaaacggaggcggggcctggaagggggcgtggcttgcgggcctctgggccgcccggcctctttaggtgccgcagcggaaggcctggagcagaggctgcttctccgcccaagcactccctgggtgagtccatactcctggcgcgagtacgatcctctcctccagggaaggccgggtccctcgctggggttcgacccgactcttcccctctacccctttctccttgttctacacctagcgagcccaggccc

SEQ ID NO: 14535 - DNA, 201 bp, Homo sapiens
ctacacgggaggctgaggccagagaatggcgtgaacccgggaggcagagctcgcagtgagccgagatggcatcactgcactccagcctgggcgacagagcgagactcagtctcaaaaaaaaaaaaaaaaaaaaaggaaaatctaggttctttctcagactgaaatttctgtaaacataatttatgatttcatagcagccag

SEQ ID NO: 14536 - DNA, 201 bp, Homo sapiens
ctctgctgtaaaagaagtgcctatagaatctttattcttttttattattattattttttgagatagagtcgctgtcgcccgggttggagtacagtggcacgatctcggctaactgcaagctccgcctcccgggttcacgccattctcctgcctcagccccacccccccgccccgccccgccccgccccgccccgcccccga

SEQ ID NO: 14537 - DNA, 201 bp, Homo sapiens
gtttttctaacaccctgaaacttaaagtgtgatagtctcagaggactaccaacataagcatcacctgaaaacttgttagaaatgaagaactaggccgggcgcggtggctcacgcctataatcccagcactttgggaggcctagatgggaggatcacgacatcaggagaccgagaccatcctggctaacacggtgagacccc

SEQ ID NO: 14538 - DNA, 201 bp, Homo sapiens
catggtgaaaacctgtctctcctaaaaatacaaaaattagccaggcgtagtggcatgcgcctgtagacccagctacttgggtggctgaggcaggagaatcgctggaacccgggaggccgaggttgtagtgagccgagatcgtaccactgcactgcagcctgggtgacagaacaagactccaacttaaaaacaacaacaaca

SEQ ID NO: 14539 - DNA, 201 bp, Homo sapiens
tttgtccaggaaatgcacataggagctggtcactctgtgttttgagtcctctcggaggtgttggacttctagagagagaaacagagacacgtaagagggcgaagatgcctcagtggtgacacactggggagtcccgcccacgacccgtccacgaccggcacactcaacctgctccacggaaccccattccacagctcggtt

SEQ ID NO: 14540 - DNA, 201 bp, Homo sapiens
cgccaggacaagcgagggtggcctgagtcctgtgctcacatggcgtatgccgcccagtagatgacattgacggccgcaaacgccgcagggaacacagcgcgggcgtaaatgtcaatggtgtctgcgtcgatgggcctgagccgggcacggatgcccccctggcctcctgagcgggctgccccctccttcttcgtctcccct

SEQ ID NO: 14541 - DNA, 201 bp, Homo sapiens
cccctgttgagagtggactccgtgcgtgtgtcccccaggaacggtgacaagtacgacggcgactgggtccgggaccggcgtcagggacacggggtgctgcgctgcgccgacggctccacctacaaggtacccgggggcgcgcggcacctgctgcccagagggtacaggcctcgtggtgggcagggcgcgtggggtgtatgg

SEQ ID NO: 14542 - DNA, 201 bp, Homo sapiens
gataccataccctatattcttttattttttttgacccggagtctcgctctgtcgcccaggcttgggtgcagcagcgcgatctcggctcactgcaagctccgcctcccgggttcacatcattttcctgcctcagccttccgagtagctgggactacaggtgcccgccaccacgcccggctaattttttgtatttgtagtaga

SEQ ID NO: 14543 - DNA, 201 bp, Homo sapiens
ccccttcccagaaagcacatgaataggccgggcacggtggctcacgcctgtaatcccagcactttgggaggccgaggcgggtggatcacgtcagaagatcgagaccatcctggctaacacggtgaaaccccgtctctactaaaaatacaaaaaaaaataagccgggcgtggcagtgggcgcctgtggtcccagctactctg

SEQ ID NO: 14544 - DNA, 201 bp, Homo sapiens
gtgtgagagccacatgctaggaataagaggtatgccgagaggcggccgggcacggtggctcacgcctgtaatcccagcactttaggaggacgaggtgggcggatcacaaggtcaggagatcgagaccatcctggctaacatggtgaaaccccgtctctactaaaaatacaaaaaattagccgggcgtggtggcgggcgcct

SEQ ID NO: 14545 - DNA, 203 bp, Homo sapiens
ttccacaacgtctttcaccatctgtgagcacggcctgcaacgtggaagacacaaccccacctgactctccccagacctccctgctgctttagcctcctacgcgccagcctccgggccttcaccccaaaccttcccaggctcagaatgccctgccccaaactccaccgacaccatctgcgaaactgtagccttccatgaccaac

SEQ ID NO: 14546 - DNA, 201 bp, Homo sapiens
atcatacatggccgggcgcgatggctcacgccatcgagtgattgctgtaatcccagcactttgggaggccgagacgggaggatcacgaggtcaggagatcgagaccatcctggctaacacggtgaaaccccgtctctactaaaaaaacaaaaacattagccgggcgtggtggtgggcgcctgtagtcccagctacttggga

SEQ ID NO: 14547 - DNA, 201 bp, Homo sapiens
agtcccagctactcgggaggctgaggcaggagaatggcgtgaacccgggaggcggagcttgcagtgagccgagatcgcgccactgcactccagcctgggcgacagagcgagactccgtctcaaaaaataaaaataaataataataataattccagatattttacaataattttcaggcacaagagttttcacgagagtagg

SEQ ID NO: 14548 - DNA, 201 bp, Homo sapiens
tgggggtcccagaacttttgtagtttatatctctttggtcttttcctgggcagcttggaggcttccgaccttccggagcccctggtatttgagtttctccgtgaaagctcgtccgagaagggcttctgccccgggtctggcagactggagtcccttcctgggcttttttcttctttccctgggtgccttgtctctcgccaa

SEQ ID NO: 14549 - DNA, 201 bp, Homo sapiens
acgcgccaccacgcccggctaatttttgtatttttagtggagacggggtttcaccatgttggtcaggctggtctcaaactcctcacctcgtgatccgcccgcctcggcctcccaaagtgttgggattacaggagtgagccaccatgcccggccctaatctcagttttatagatgaaaaaacggaagctcaggatcagtgac

SEQ ID NO: 14550 - DNA, 201 bp, Homo sapiens
aagcagtatttggttttctgttcctgtgttaattcactccggataatggcctccagctgcatccatgttgctgcaaaggaccggattttgttctttttacgactgcatagtattccatggcatatatatatatacaccacattttcttaatccggtctatccatgtctttgctgttgtgaatagttctgcaatgaacatgc

SEQ ID NO: 14551 - DNA, 201 bp, Homo sapiens
ttaaataaatgccgggtgtcagggccgctgagtaagacaacaggccgcaaggacgcagcagaggaccctcggtcgatttgctgcgatggagtgagccagcggtgaggcctgaaggcccctgttttattttcccctcggagcagaggccggggagggtgctgggtgtcagcacagagcagagggccggtcacggaactgggg

SEQ ID NO: 14552 - DNA, 201 bp, Homo sapiens
gggagtgcagtggcgcgatctcggctcactgcaacttccgcctcccgggttcaagcgattctcctgcctcagcctccccagtaggtaggactacagtcgcgtgccaccacacccggctaattttttgtatttttagtagagactgggtttcaccatgttagccagaatggtctcaatctactgacctcgtgatccgcccgc

SEQ ID NO: 14553 - DNA, 201 bp, Homo sapiens
ttagtagaaacagggtttcaccatgttggccagaatggtcttgatctcttgaccttgtgatctgcccgcctcgctctcccaaagcgctgggattacaggcgtgagccactgcgccctgtccactgtccatcttcttttgctcgctctatcctgactgccggggccctggacactacacaaagagctagctggagagtgaga

SEQ ID NO: 14554 - DNA, 201 bp, Homo sapiens
ggaatgcagtggcgccatctcgctgactgcatcctccgcctcccggttgcaagtgattctcttgcctcagcctccccagtagctgggattacaggcgtgcgccacaacactcagctaatttttgtatctttagtagagacgggttttcaccaagttggccaggctggtctcgaactcctgaccccgtgatccgcctgcctt

SEQ ID NO: 14555 - DNA, 201 bp, Homo sapiens
cacctcggcctcccaaagtgctggtgttataggtgtgaaccatcgcacccggcctgctttttattttattatttatttattttttctgagactgagtctcgctcttgttgcccaggctggagtgtgcagtggctcaatctcggctcactgcaaactccgcctcccgggttcaagcgattctcctgcctcagccccctgagt

SEQ ID NO: 14556 - DNA, 3238 bp, Homo sapiens
tttttccccggactggctcaacttctcctttcaagcctggcatcctgttcccttccagcgggggatatcttgccgctttggggtgcccgtcgtgggcgccgcacgattctgggtgcaagccagagactccacaaacacgccgggccctgcgcagcggcttccgggaaggcactgtcatccgtgggagggcccggcccgccactttttaccccctgctgcctcaacgtcaccttccaagcctggcgtcctcttcccttcccctggaggccttcgtgctgctttggggtgccccctgtgggcgagacacacaacctgggtgcaagccagggactccgcgaccatccctggcccggcgcaggggtggccatccttgggacgacaccatcccgccacttttttccttggactgtctccactatccccttcaaccctggcgtcctgtacccttcccccagtggccttcttgccgctttgtggtgctccccgtgggtgagacacgcacccggggtgcaagacagggactccaggacgctcccgggcccactgcagaggctgctgggaaggcagtgtcgtccgtgagaggaccccagcatccccgctttttttccccggggctgcctcaacttcccccttcaagactgacgtgctgtccctttcccccgggaaccttcttgctgctttgtggtgcccgccgtgggcaagacactcaccctgggtgcaagccagggaatcaacaacccccgcatgcccggcaaaggggctgccggtaaggcactgtcattcgtgggatcaccccagcctcgctgcttttttctccaggctacctaaacgtccccattcaagcctggcgtcctgttgccttcccgcgggggacttcttgccactttggggtgccccccgtgggcgagacacgcacattgtgtgcaagacagggactccgcgaccctcccgggactggcataggggctgtagggaaggcactgtcatccgtgaaaggaccccagcctcgcccctttttttcctgggctgcctcaacgtcccctttcaagtctggcatcctgttcttccccccccggggctttcttgctgctttggggtgccacccgtgggcgaggcacgcaccctgggtgtaaaccagggactccaagacccccagggccaggcgcaggggatgtcgggaagtcactgtcctccgtggaaagtttttccctggactgcctcaaagtcccctttcaagcctggcatcctgttcccttcccccggagcccttcttgcagctttcgcgtgcacacttaggcgagacacgcactctgttgcaagacagggactccaaacccccccgcctgggccaggctcaggggctgccgggaaggcactgtggtctgtgggacgaccacagcctagccgctgttttcctctggctggcccaacgtccctcttcaagcctgacatgttgtccccttcccccgggggccctgttgccactttcacgtgcaccccgtgagcaagacaggcaccctgggtccaagccaggggctccaccgtccacctgggtcccactcagaggctgccgggaaggcactgttctcagtggaaattttttccccggactgcctcaacgtcccctttcaagctcggcgtcctgttcccttccactcggggacttcttaccgcattgcggtgcccatcgtgggcacgacacgcaccccgggtgcaagccagggactccacaaccaccccaggcccgatgcaggggctaccggacaagacactgttgtccttgggatgacaccggtctgcctcaactctacctttcaaccctggagtcctgtacccttcccctgggggccttcttgctgctttgtggtgccactcgtgggcgagacacacaacctgggagcaagccagagactccacgacacctctgggcccactgcagaggctgccaggaaggcggtgtcatccgtgggaggaccccagcttcaccacttttaccccggggccgcctcaacctccccttcaagcctgacgtgctctcccttcccccgggaatctacttgccgctttggggtgcccccttgagcgagacacgcaccctgggtgcaagccacggactccaggaccaccctggcccagcgaaggggctgccaggaaggcactgtcgtttgtgggagaaactcagcgtcgccgtttttttccacgggctacctcaaagtcccccttcaagtctgaggtgctgtccccttcccccaggggcctacttgccgctttggggtgcctcccatgggcgaaacacgcaccctgggtgcaagatagggactccacgatccccccgggcccagcgcagggactgccaggaaggcactgtcatccgtaggaggaacccgactagccgcttttctctctgtgctgcctcagcatccccattaaagcctggccttctgtggcgttcgcccggcggccttcttgccactttggggtgcccccatgggtgcgacccgcaccctcggtgcaagccagggactccacgaccaccccgggcctgacgcaggggctgctgggaaggcactgtcgtccatgggacgaccccagcctgccacgtttttccccggactgcctcaactatccctttcaaccctggcgtcccatacccttcccccggtggccttcttgccgctttgtggtgccccccgagggcgagacacgcaccttgggtgcaagccaaggactccatgacgctcccaggcccaccacagatgctgtcgggaagacagtgttatccgtggcaggaccccagcatcccctctttattcccggggctgcctcaacgtccccctccaagcctgacgtgctgtccccttcccctgggaacctacttgccgctttggggtgccccccgtggaaccctgggtgcaagcctgggacacaacaaccccctcgggcctggcaaaggggctgccgggaaggcaccgtggtccgtgggaagttttttcctggactgcttcaaagtcccctttcaagcctggcgtcctgttcccttcccagggggcattcttgccgctttggggtgtccccccgtgggcgcgacacgcaccctgggttcaagtcaggaactccacgacaaccccgagtctggcgcaggggctgccgggaaggcactgtcgtccgtgtgacgatcgctgcctgctgctttttccctcgtgctgcctcaacgtcacctttcacgcctggcgttcta

SEQ ID NO: 14557 - DNA, 201 bp, Homo sapiens
tgccacctcgcccggctaattttgtgtgtgtgtgtttttagtagagacggggtttcaccgtgttagccaggatggtctcgatctcctgacctcgtgatccgcccccctcggcctcccaaagtgctgggattacaggcgtgagccaccgcgcccggccttctgtatattattttctgagacactttgaggtaatagccttgg

SEQ ID NO: 14558 - DNA, 201 bp, Homo sapiens
cgacgcccaagcactcgagaacggtgaccaattattttggagagcacttgcaaaggcggccccctagccgtcctctccggaagccgcagtctttgtgtccgcccccgcaccttgcacacctgctgaggtggggcgtgttaatcatcaaattactaatgagtgatggcccaaattgcaggcagagtaatgaatagatggtgg

SEQ ID NO: 14559 - DNA, 201 bp, Homo sapiens
tgcaataagcccgggggttgaccctgggcgtgccgggggcgagggggtcacggtggagacggacacgggcgtggggcggccgagacctgcacggcccagcgggcaccggcactgcggggtcttcgttctcagaggattactgtttcatattgaagctctctcttttgtacattcagagtttgatgcatttctaatcaccgt

SEQ ID NO: 14560 - DNA, 201 bp, Homo sapiens
gggcgtggtggcgggtacttgtaatcccagctactcgggaggctgaggcaggagaatggtgtgaacccgggaggtggagcttgcagtgagccgagatcgcgccactgcactccagcctgggcgacagagcgagactccgtctcaaaaaaaaaaaaaaaaaaaaagaagaagtcagagcaaggaggcagaatgatccccagg

SEQ ID NO: 14561 - DNA, 201 bp, Homo sapiens
ggccagggcgcacgcggcgctggggcccggggggatgcccgctgtcccggccgcaccctggtcacgtacacctttgggggcggctgctccactgcagggcgcgggggcggagctcggcccaagaagagcggcaaagggcgggcggccctggcggcccagctcagggcccgggagtgcctgggggtccccccgtcccggggg

SEQ ID NO: 14562 - DNA, 201 bp, Homo sapiens
aaaaagcaaaaaacaaaaattagccggccatagtggtgggtgcctgtaatcccaactgctcgggaggctgagtcaggataatagcttgatcctgcggggcggaggttgccatgagccaaaatcgtgccacttcactccaggttgggcgcaagagcgagactctgtctcaaaaaaaaaaaaaaagtttcatgccgggcgccg

SEQ ID NO: 14563 - DNA, 201 bp, Homo sapiens
caggcgtgagccaccgcgcccggctatccctgataactttatttcaaatagtgacaggttaaaagttaagagcggatgtttcagtatctagtttcccagcgtcttgccagttactttaagcttgtcgacaggagtttgatttcactgacctccctccttcctagagctatgcttactttttaaaattttaagaagctgctt

SEQ ID NO: 14564 - DNA, 201 bp, Homo sapiens
actccggaggctgaggcaggagaatggcgtgaacgcgggaggtggagcttgcagtgagccgagatcgcgcctcctgacctcaggtgatctgcctgcctccgcacccggccaacctgtttttgtatacataatcttttcactgctcaatacatttcagggttcttcaatttcacacttcacacttcagcttcttcaatagat

SEQ ID NO: 14565 - DNA, 201 bp, Homo sapiens
cagggtttcgctgtgttggccgggccggtctccagcccctaaccgcgagtgatccgccaacctcggcctcccgaggtgccgggattgcagacggagtctcgttcactcagtgctcaatggtgcccaggctggagtgcagtggcgtgatctcggctcactacaacctacacctcccagccgcctgccttggcctcccaaaat

SEQ ID NO: 14566 - DNA, 201 bp, Homo sapiens
aggccgaggcaggcggatcacaaggtcagaatatcgagaccatcctgggtagcacgatgaaaccccgtctctatcaaaaaatacaaaaaattagccgggcgtggtggtcggcgcctgtagtaccagctgctcaggaggctgaggcaggagaatggcatgaacctgggaggcggagcttgcagtgagccgagattgcgccac

SEQ ID NO: 14567 - DNA, 201 bp, Artificial Sequence
  Description of Artificial Sequence: Synthetic polynucleotide
gagtgtagtggygtgatttyggtttattgtaagtttygtttttygggattaygttatttttttgttttagtttttygagtggttgggatttataggtgttygttaatatgttyggttaattttttgtatttttagtagagayggggttttatygtgttagttaggatggtttygatattttgatttygtgattygtttatt

SEQ ID NO: 14568 - DNA, 208 bp, Artificial Sequence
  Description of Artificial Sequence: Synthetic polynucleotide
ttggttaatatgatgaaattttgtttttattaaaaatataaaaaattagtygggygtggtggygggygtttgtagttttagttattygggagattgaggtygaatggygtgaattygggaggyggagtttgtagtgagtygagattatattattgtattttagtttgggygatagagygagattttgttttaaaaataaataaataaa

SEQ ID NO: 14569 - DNA, 201 bp, Artificial Sequence
  Description of Artificial Sequence: Synthetic polynucleotide
atayggtgaaatttygtttttattaaagtataaaaaattagtygggtatagtggtataggtttttagttttagttatttgggaggttgaggtaggagaatygtttgaattygggaggyggagggtgtagtgagttattgtaygttagtttgggtaatagagttagatttygttttaaaaaaaaaaaaaaaaaagaaagaaa

SEQ ID NO: 14570 - DNA, 201 bp, Artificial Sequence
  Description of Artificial Sequence: Synthetic polynucleotide
gtygaggtgggygaattatttgaggttaggagtttaagattagtttggttaatatggtgaaattttatttttattaaaaatataaaaattaatygggtatygtggtgygtgtttgtaattttagttattygggagattgaggtaggagaattgtttgaattttgtyggtagaggttgtaatgagttgagattgtattaygg

SEQ ID NO: 14571 - DNA, 201 bp, Artificial Sequence
  Description of Artificial Sequence: Synthetic polynucleotide
ttttggaggttatatttggataggagtyggtttttaattttagttaagagtttatagaggggtttttgtttaattgtatggagtttatggttgataggygyggyggtaggaygggaygggatyggatgggttgtgtatttgtttttatattagtattatattgttttgattattttagtttgtaagatgtttgaaatttat

SEQ ID NO: 14572 - DNA, 201 bp, Artificial Sequence
  Description of Artificial Sequence: Synthetic polynucleotide
aaaattataataaagtttttgtttaattatagattttgatttattggttaggtaggttgtttggtttttgatttgtatttagagggttttyggattttggygttgygtgggttagtgtttygggagtyggggatyggtattggtygtgttyggttgttgagtgtgttttattaattattatttygtttttttaggttaatg

SEQ ID NO: 14573 - DNA, 201 bp, Artificial Sequence
  Description of Artificial Sequence: Synthetic polynucleotide
gaggttttttttatttaggtaaagaagaaagaaggatggttttaggagtttatataatatggttaaaggtygggtagygtgtagtagaatgtaagatgagyggttaggttatagggygagattatgaaggattttttttyggttttaaatgttttttaagagtgtttttttattatttttttttttattttttaagaatag

SEQ ID NO: 14574 - DNA, 201 bp, Artificial Sequence
  Description of Artificial Sequence: Synthetic polynucleotide
tttttaagtagttgggattataggygttygttattaygttyggttaatttttaatatttttagtagagayggggttttattgtgttagttaggatggtttygattttttgatttygtgattygttygtttyggttttttaaagtgttgggattataggtttgagttattgygttyggtttttagtttttatatttgttaaa

SEQ ID NO: 14575 - DNA, 201 bp, Artificial Sequence
  Description of Artificial Sequence: Synthetic polynucleotide
ttaatataaaaattagttgttttagtygggygyggtggtttaagtttgtaattttagtattttgggaggtygaggygggyggattaygaggttaggagatygagattattttggttaatayggtgaaatttygtttttattaaaaatatataaaaaatgagtygggygyggtggtaggygtttgtagttttagttatttag

SEQ ID NO: 14576 - DNA, 201 bp, Artificial Sequence
  Description of Artificial Sequence: Synthetic polynucleotide
taaattttgttgttgtttattttatgggtttatattgtttttatgagttgtaatatttatygtaaaggtttgtaggtttatttttgagtyggtaagattaygaatttattagaagaaatttygaatatattygaatattagaaggaataaatttyggataygttatttttaagaattgtaatatttatygtaagggttygt

SEQ ID NO: 14577 - DNA, 201 bp, Artificial Sequence
  Description of Artificial Sequence: Synthetic polynucleotide
ttttgttttagtttttttagtagttgggattataggygttygttatygygttyggttaattttttgtatttttaatagaaayggggttttatygtggtttygattttttgatttygtgattygtygtttatttyggttttttaaagtgttgggattataggygtgagttatygygttyggtttttttttttatttttaata

SEQ ID NO: 14578 - DNA, 201 bp, Artificial Sequence
  Description of Artificial Sequence: Synthetic polynucleotide
ggggttttatygtgttagttaggatggtttygattttttgattttgtaataygttygtttyggttttttaaaatgttgggattataggygtgagttatygygtttagttggttttataggtatttatgtatattaatagtttttttttgagayggagtttygttttatttttaggttggagtgtaatggygttgttttgat

SEQ ID NO: 14579 - DNA, 235 bp, Artificial Sequence
  Description of Artificial Sequence: Synthetic polynucleotide
ttaattttttaggtgtygtttgttatttttttttttgattaggaaagggaattttttgattttttgtgttttyggagtgaggtaatgtttygttttgtttyggtttaygtagggtgygygtatttattgatttgygtttattgtttggtattttttagtgagatgaattyggtattttagatggaaatgtagaaattatttattttttgygtygttttttttgggagttgtagat

SEQ ID NO: 14580 - DNA, 201 bp, Artificial Sequence
  Description of Artificial Sequence: Synthetic polynucleotide
ggtagataaagatatatgattagggtyggtygyggtgatttatgtttgtaattttagtattttgggaggttaaggygaayggattaygaagttaggagatygagattattttggttaatatggtgaaattttgtttttattaaaaatataaaaaattagtygagygtggtggtgggygtttgtagygttagttattygggg

SEQ ID NO: 14581 - DNA, 201 bp, Artificial Sequence
  Description of Artificial Sequence: Synthetic polynucleotide
taggtgatttttgtatttttatttgaggtatygggtttattttattagggagtgttagatagtgggygygggttagtgggtgygtgtattatgygtaagtygaagtagggygaggtattgttttatttgggaagygtaaggggatagggagtttttttttygagttaaaaaaaggggtgatagaygtatttggataattag

SEQ ID NO: 14582 - DNA, 201 bp, Artificial Sequence
  Description of Artificial Sequence: Synthetic polynucleotide
agagatagaagttgttggagggygagaggaaygtattagtggaagaagatagaagyggttggttayggagagtatgttagtagaagaatatatttatagaygtyggttygttygygggtttttyggtaggttatygatyggtgggaygaggtggagtttgttttgggtagtaggaggatagttygggtatttagyggttta

SEQ ID NO: 14583 - DNA, 201 bp, Artificial Sequence
  Description of Artificial Sequence: Synthetic polynucleotide
tttatagaggtaggtaggtttttttgagttgtggtgggttttatttagttygagtttttyggttgttttgtttatttaagygagtttgggtaatggygggygttttttttttagtttygttgttgttttgtagtttgattttagattgttgtgttagtaattagtaagattyggtgggtataggatttttygagttaggtg

SEQ ID NO: 14584 - DNA, 201 bp, Artificial Sequence
  Description of Artificial Sequence: Synthetic polynucleotide
gtttttttttttagttaaagaaaggggtgatagaaggtatttggaaaatygggttatttttattagaatattgygttttttygaygggtttaaaaaayggygtatttggagattatattyggtatttggtttagagggttttaygtttatagagtttygttgattgttagtatagtagtttaagattaaattgtaaggygg

SEQ ID NO: 14585 - DNA, 201 bp, Artificial Sequence
  Description of Artificial Sequence: Synthetic polynucleotide
ygttygttatttttttttttgattyggaaagggaattttttgattttttgtgttttttaggtgaggtaatgtttygttttgtttyggttygygtayggtgygygtatttattggtttgygtttattgtttggtatttttttagtgagatgaattyggtattttagatggaaatgtagaaattattygttttttgygtygtt

SEQ ID NO: 14586 - DNA, 201 bp, Artificial Sequence
  Description of Artificial Sequence: Synthetic polynucleotide
gtaagtaaggggygtgttttagttttgtttgtgttagagtttttttatttttattatttggtaggtttagygttygggaataatgaygtaygtggataagyggagggtgagtaaggtgaagaggagttttattgagtaatagaatagtttagaggagattygyggtgggtagtttttttttgtagttagggtgttttgatg

SEQ ID NO: 14587 - DNA, 201 bp, Artificial Sequence
  Description of Artificial Sequence: Synthetic polynucleotide
ggtagattatttgaggttaggagttygagattagtttggttaatatggtgaaatttygtttttattaaaaatataaatattagtygggygtggtggtggtygtttgtaattttagttattygggaggttgaggtaggagaattgttggatttygggaggtagatgttgtagtgagttaagattatgttattgtattttagt

SEQ ID NO: 14588 - DNA, 201 bp, Artificial Sequence
  Description of Artificial Sequence: Synthetic polynucleotide
ttgtagtatatattattatttttttagtatattattattttttaattyggtttttatygttaataaagttgtyggttgtaggaatgagagagtggtagaaygatattttygttttattttttgggattttttagttgttggyggttttaagtttttaggagttayggtgttttttttttttagatgttagtgttaatagtg

SEQ ID NO: 14589 - DNA, 201 bp, Artificial Sequence
  Description of Artificial Sequence: Synthetic polynucleotide
ggttagaagayggtgagtggaaagttygggygygtggagagattttaagaaggggttgtttagttgtgaattttgtatttgtygttygtgttttatttggyggttttgaaattaggtttttatttggatttttgtgagttgtatattttyggttagttattttygttttagagggtttagatattggtagtgtyggaagac

SEQ ID NO: 14590 - DNA, 207 bp, Artificial Sequence
  Description of Artificial Sequence: Synthetic polynucleotide
gtttttgtgatttttgtagttagygaattagtatatttttggggttgaagttaygtgttaggtaygttagygttattagttygtttagggttagttttttygayggyggyggtagtaggtggatttygggtyggaatgtgttttttggagggtagagagttaggttagggggttgggtaggggatgagagagtttttttgttttggt

SEQ ID NO: 14591 - DNA, 201 bp, Artificial Sequence
  Description of Artificial Sequence: Synthetic polynucleotide
tttatggggtagttagaagggagatggtttttttttggagttggggtgttyggtagtttyggtttttttttgattgtttaggttaattttygttttttttygttggtttayggtttattggttttygggtgtttgttagygtgtttttttgttggggtgtttttatggatgattagygtttgtgttttttttttttgatgt

SEQ ID NO: 14592 - DNA, 201 bp, Artificial Sequence
  Description of Artificial Sequence: Synthetic polynucleotide
gaagaygggtgatttttgtatttttatttgaggtatyggttttattttattagggagtgttagatagtgggygtaggttagtgggtgygtgtatygtgygygaagtagggygaggtattgttttatttgggaagygtaaggggttagggagtttttttttygagttaaagaaaggggtgayggaygtatttggaaaatygg

SEQ ID NO: 14593 - DNA, 201 bp, Artificial Sequence
  Description of Artificial Sequence: Synthetic polynucleotide
ggggygtggttttttggagggaattagtgtggagatgttygtgtgtttggggygtggtttttyggagggagttagtgtggagatgttygtgtgtttggggygtggtttattagagggagttagtgtggagatgttygtgtgtttggggygtggttttttggagggaattagtgyggagatgtyggtgtgtttggggygtgg

SEQ ID NO: 14594 - DNA, 201 bp, Artificial Sequence
  Description of Artificial Sequence: Synthetic polynucleotide
gaygttttttattttttagatggggtggtggyggggtagagatattttttagtttttagatggggtygyggtttggtagaggtgttttttatattttagaygatgggtggtygggtagagaygttttttattttttagaygggatgayggttaggaagaggygttttttattttttagattgggyggtygggtagaggggt

SEQ ID NO: 14595 - DNA, 201 bp, Artificial Sequence
  Description of Artificial Sequence: Synthetic polynucleotide
gagtatagygtyggygggttggtattgttgggggattyggygtattttttatagttgttgtttygggtggtaagttttttattgttyggggttggtggggyggttagttgttyggagtgtggggttygttaaggttatgtttatttagaatttgttttggtttatygygagtagttttagttttygtttygygtttttttt

SEQ ID NO: 14596 - DNA, 201 bp, Artificial Sequence
  Description of Artificial Sequence: Synthetic polynucleotide
tttttgagtagttggggttataggtgtttattattaygttyggttaattttttgtatttttagtagagatggggttttatygtgttagttaggatggtttygattttttgaygttgtgatttatygtttyggtttttygaaatgttgggattataggtttgagttatygtattyggttatatttatttatttttaattaga

SEQ ID NO: 14597 - DNA, 201 bp, Artificial Sequence
  Description of Artificial Sequence: Synthetic polynucleotide
ttttttttttttttgattggtttygtttttattgtyggtttygtttttattgtyggttygggttttatttaygttggagttgttttatttaaggagattgygtagttggaaagttataygtgtgagtttagaggygggtttyggttgtagatttgttatggttttygaagtttttgtgygtttaggggtgttttttggtyg

SEQ ID NO: 14598 - DNA, 201 bp, Artificial Sequence
  Description of Artificial Sequence: Synthetic polynucleotide
gttagttagttattttgagatggagttttgttttgtygtttaggttgtagtgtagaatygtttttttggtttattgtaatttttatttttygggtttaagygataattttgttttagttttttaagtagttggaattatagaygtgtattattaygtttaattaatttttgtatttttagtagagatggggtttygttata

SEQ ID NO: 14599 - DNA, 201 bp, Artificial Sequence
  Description of Artificial Sequence: Synthetic polynucleotide
gyggttttttttgatttagatygtttttaaatatygaaygttgaattgggtygggygyggtggtttttatttgttattttagtattttgggaggtygaggygggyggattatgaggttaggagatygagattattttggttaatayggtgaaatttygtttttattaaaaatataaaaaaaaaaaattagtygggygtgat

SEQ ID NO: 14600 - DNA, 201 bp, Artificial Sequence
  Description of Artificial Sequence: Synthetic polynucleotide
ttatttttgttttttattttgggggttttatgatttyggagtttttaygttttggtatagagtttgttttttygggattgggtttyggtygagtagatatygtttagttgttttttgattagygttttttgttttgygtttggttggtatyggyggtttgttgagtttagtttggtatttygttggtatyggyggttygtt

SEQ ID NO: 14601 - DNA, 380 bp, Artificial Sequence
  Description of Artificial Sequence: Synthetic polynucleotide
ttttattaaaatataaaaaattggttgggggtggtggtaygtgtttgtagttttagttataygggaggttgaagtaggggaattgtttgaattygggaggyggagattgtagtgagtygagatygtgttattgtattttaatggtattttagtttgatgatagagygagatttygttttaaaaataataataaataaataaataaataaataaaaattagttgggygtggtggygtgtgtttgtagttttagttattygggagattgaggtaggagaatygygggaattygggaggyggaggttgtagtgagtygagatygygttattgttttgtagtatggagatagagttagatttygtttaaaaaaaaaaaaaaaaa

SEQ ID NO: 14602 - DNA, 201 bp, Artificial Sequence
  Description of Artificial Sequence: Synthetic polynucleotide
aggygggyggattaygaggttaggagatygagattattttggttaatayggtgaaatttygtttttattaaaaatataaaaaattagttgggygtggyggygggtatttttagttttagttatttgggaggttgaggtaggagaatggygtgaattygggaggyggagtttgtagtgagtygagatygygttattgtattt

SEQ ID NO: 14603 - DNA, 201 bp, Artificial Sequence
  Description of Artificial Sequence: Synthetic polynucleotide
aaaaattagttyggygtggtggtaygygtttgtaattttaattatttgggaggttgyggtaggtgaattatttgaagtygggaggtgaaggtygtagtaaygttgttttttgtattggatgaagtgttttttattaaatttttttatyggagagggtgggatttgygggttttttgggtggtttgatttygatattttgtg

SEQ ID NO: 14604 - DNA, 201 bp, Artificial Sequence
  Description of Artificial Sequence: Synthetic polynucleotide
ayggygaattgyggygattgtgaygtgtttttttatttttttttyggtggattttttttatttgttttttttttaatttttaataagtttttattatygaygaygtgagaygaygayggtatgggattttttatttygttagggttaatgaattttatattatgagttgtatgaggtatgagggagtttttaagggaggaa

SEQ ID NO: 14605 - DNA, 201 bp, Artificial Sequence
  Description of Artificial Sequence: Synthetic polynucleotide
gaygtagaagaygggtgatttttgtatttttatttgaggtatygggtttattttattagggagtgttagatagtgggtataggttagtgggtgygtatatygtgygtgagtygaagtagggtgaggtattgttttatttgggaagygtaaggggttagggagtttttttttygagttaaaggggtgayggaygtatttgga

SEQ ID NO: 14606 - DNA, 201 bp, Artificial Sequence
  Description of Artificial Sequence: Synthetic polynucleotide
taaataattagggataaagagtattatattgtygaatttattttatttttaattttttttttaaattttttataaaaaattagtygggtgtggtggygggygtttgtagttttagttatttagagattgaggtaggagaatggygtgaattygggaggaggagtttgtagtaagyggagatygygttattgtattatagtt

SEQ ID NO: 14607 - DNA, 201 bp, Artificial Sequence
  Description of Artificial Sequence: Synthetic polynucleotide
atttttgtgatttatattttattygtatattttttttttttttgaaaatttttaataaaaatttgttggttttayggtttaggggtattatagaatttatygatatgtgatgtttttttyggatgttyggttttaaaattttttttttttgtattttgtttttttattttttaatttggtygaygtttagggaaaatagaa

SEQ ID NO: 14608 - DNA, 201 bp, Artificial Sequence
  Description of Artificial Sequence: Synthetic polynucleotide
ttttggygaatttttattgttataattttaaaaattyggtttagggaggagtttattttttattttttatataggygatatatgtagaaatataattygtygttgtgtttgtgyggttaggattttttttttataygtaatgatttagttgattagtttaagatatgttyggtttttaygtttgtttgtaggggtattgtt

SEQ ID NO: 14609 - DNA, 201 bp, Artificial Sequence
  Description of Artificial Sequence: Synthetic polynucleotide
ttgggagtagaggtttttyggaaggtattatttttagagygtgtttttgagtaattttgaggatgggtttygggttattattgtgtgttggaaatagtagygtttaggttgtyggaggaggttggtttttttggtaggttttggttgtgtttagagttttgtgggttttggagataaggtttyggtttgaggtttttgggg

SEQ ID NO: 14610 - DNA, 201 bp, Artificial Sequence
  Description of Artificial Sequence: Synthetic polynucleotide
gtttgagtaggataaggattttagagtttaagagaattttgatgattagagaagggttttygaggttatyggggatgtayggtttgtatttyggtttttgygggataatggaggtttttttttttttttgtgttygggttygggtttttgtagatagatttttatatttagaggtgagaaattagatataattagatattt

SEQ ID NO: 14611 - DNA, 201 bp, Artificial Sequence
  Description of Artificial Sequence: Synthetic polynucleotide
ttatatgttaggttataaaataagtttttagaaatttaagaagattgaaattatattaattattttttaaaaaaaataggtggtygggygyggtggtttaygtttgtaattttagtattttgggaggtygagaygggyggattaygaggttaggagatygagattattttggttaatayggtgaaatttygtttttattaa

SEQ ID NO: 14612 - DNA, 568 bp, Artificial Sequence
  Description of Artificial Sequence: Synthetic polynucleotide
ttagtatatagatataaaaatgagaggtgatagygtgttggtagtttttatagttttygttttttttyggtattttttyggttttggygtttattttggtygygtttgaggagttttttagttygtygttgtattgtgggagtttttttttgggttggataaggttggagtyggtttttttagtttgygggtaggtgtggagagagaggygtgggygggaatygtggttgtaggttgygtttgygggttagttygagtttygggtgggygtgggtttggtaagtttygtattyggagyggttagtyggttygggtagtgaggagtttagtatttgggttagtagttgttgtgttygatttttygttgggttttagttgttttttygtygggtagggttygggatttgtagttttttatgtttgagtttttattttygtygtgygtttttgtgtagtttaagttttttygaygagygttaatttttgttttayggygtttagttttatygattgtttaagggttgaggagtgygggtatayggygtyggattggtaggtagttttattt

SEQ ID NO: 14613 - DNA, 201 bp, Artificial Sequence
  Description of Artificial Sequence: Synthetic polynucleotide
tttattaaaaatataaaaaattagttgggtattatggtgggtgtttgtagttttagttattygggaggttgaggtaggagaatggygtgaattygggaggyggagtttgtagtgagyggagatygygtygttgtattttagtttgggygatagagtaygagttygttttaaaaaaagaaaaaaaagaaagaaaagaaaaga

SEQ ID NO: 14614 - DNA, 201 bp, Artificial Sequence
  Description of Artificial Sequence: Synthetic polynucleotide
gggttggttaaggtyggagttggttttttttgtttgyggggaggtgtggagggagaggygtaggtgggaattagggttgtgtggggygtttgtgggtaagygtgagtttygggtgggagygggttyggtaaatttattttagggtgttttgttttttataaagaaaattttttttggggtttttatgggtttttttgggat

SEQ ID NO: 14615 - DNA, 201 bp, Artificial Sequence
  Description of Artificial Sequence: Synthetic polynucleotide
ttttaagtagttgggattataggtattygttattatgtttggttaattttttgtattttttagtatagatggggttttatygtgttaattaggatggtttygattttttgatttygtgatttgttygttttggttttttaaagtgtygggattataggygtgagttatygtgtttagttatatattatattttttttattt

SEQ ID NO: 14616 - DNA, 201 bp, Artificial Sequence
  Description of Artificial Sequence: Synthetic polynucleotide
aattatggggtgaattttgttatggggatatgtatttggggggaaggttgtgatgggaggggtattygggttaaataygggyggttgttagtgaagagttygtaagatagagtaggagttagggggaatagggagggaggggtattttttttttttttttttgagayggagttttattttgttttttaggttggagtgtag

SEQ ID NO: 14617 - DNA, 201 bp, Artificial Sequence
  Description of Artificial Sequence: Synthetic polynucleotide
tataggagtataaaagggttggyggttttgttygggtatattgttygtttttttatttattygtgtattttagtttattatttttgagttgggygtagtaygtggtttagagaaygggaagggatttaygagtgtttgatatatataattattgttgttggtgattatttttatttatgagtggygtatggatggggttag

SEQ ID NO: 14618 - DNA, 201 bp, Artificial Sequence
  Description of Artificial Sequence: Synthetic polynucleotide
taaaggtttgtttttgtatttaagtatttgagtttttaagagttagttttygggtttttttggagtaaggtttygttyggttttaygtatttgtttygttygtygtgatggtgagttygttgttgggttygtttttgttaattyggtttttggygtatatgyggatgttgtaggtggaggaagggtggatattaatgatgg

SEQ ID NO: 14619 - DNA, 201 bp, Artificial Sequence
  Description of Artificial Sequence: Synthetic polynucleotide
tttggttggttttgggatttgttttttggtggttaagtagtggttatgaaagtttagtygttgttatatttttgaggaatyggygtattttygtttatagyggtagttgggggtatttaygtggttyggggttgttttgatttggtagygtatgggggttgttgtttgggttttttagtgtgttatttgygygtttttygt

SEQ ID NO: 14620 - DNA, 201 bp, Artificial Sequence
  Description of Artificial Sequence: Synthetic polynucleotide
ttyggygtyggtatttattagygtggttagtttggtygaagtttygyggaagggygggattaggygtygtatygtygtgtttagggattggaattggygtygttygtaggttatgaggtttattatggagtttagygtygtattttgygagaggggtggatgtgggggtygtagggattttagayggttygggatygattt

SEQ ID NO: 14621 - DNA, 201 bp, Artificial Sequence
  Description of Artificial Sequence: Synthetic polynucleotide
tggttattttgggagtttgttgttgatgaattgtagtatggttatttgggtygtttattttgtatggttaygttgttyggttattgttgtaggtaygtttygtttygtttaattttttggttggtggggttattygggtgtttgtataygattttttttgagagggttagaggtyggtttaattatttgtaaataatgtta

SEQ ID NO: 14622 - DNA, 201 bp, Artificial Sequence
  Description of Artificial Sequence: Synthetic polynucleotide
ttagtatataggatatttatgygtgtttattattyggtataygggagatttaygygtgtttattgtygggtataggggagatttaygygtgtttattgttyggtataygagagatttaygygtgtttatygtttggtatagggagatttaygygtgtttattgttyggtataggggagatttaygygtgtttattgttygg

SEQ ID NO: 14623 - DNA, 201 bp, Artificial Sequence
  Description of Artificial Sequence: Synthetic polynucleotide
aggggaatagtaatagaagttttatttattaggtatttattgtgtgttaagtattgtgttaagggttttatagaataatagtataagaattttggtygggygtagtggtttatttttgtaattttagtattttgggaggtygaggtgggtggattaygaggttaggagttagagagattagtttagttaatatggtgaaat

SEQ ID NO: 14624 - DNA, 201 bp, Artificial Sequence
  Description of Artificial Sequence: Synthetic polynucleotide
tgtaygtatygtgygygagtygaagtagggygaggtattgttttattygggaagtaygaggggttagggagtttttatttttagttaaagaaaggggtgayggaygtatttggaaaatygggttatttttattygaatattgygttttttyggygggtttaaaaaayggygtattaygagattatattttatatttggttc

SEQ ID NO: 14625 - DNA, 201 bp, Artificial Sequence
  Description of Artificial Sequence: Synthetic polynucleotide
gttygttattaygttyggagaattttttgtatttttagtggagataggtttttattatgttagttaggatggtttygattttttgatttygtgatttgttygtttyggtttygtaaagtgttgggattataggygtgaggtatagygttyggtttygattgttttatttaaagtaatgaaagtatagttggttttaaagga

SEQ ID NO: 14626 - DNA, 201 bp, Artificial Sequence
  Description of Artificial Sequence: Synthetic polynucleotide
tttgyggttagttggattaggtggtyggtagygagayggaataagtagattaggttgagggtgaaggygtaggygattagtagtatggataagaggttgtygtttgttattttttttatygtttggtttagtatttatttattygtttgtagtaagtttagtagtattatttyggtygtygtygttattttattttgtygg

SEQ ID NO: 14627 - DNA, 201 bp, Artificial Sequence
  Description of Artificial Sequence: Synthetic polynucleotide
ttagattgttttttttttgagatagagtttygttttgttatttaggttagagtgyggaggygygattttagtttattgtaagtttygtttttygggtttaygttatttttttgttttagttttgygagtagttgggattataggygtttgttatygygtyggttaatttttttggtatttttagtagagatagggttttat

SEQ ID NO: 14628 - DNA, 201 bp, Artificial Sequence
  Description of Artificial Sequence: Synthetic polynucleotide
atagtttattaaaaatataaaaaaaaaaaaaaaaaaatttgtygggtgtggtggtgtgtgtttgtaattttagttatttgggaggttgaggtaagagaatygattgaattygggaggtagagattgtagtgagtttagattatgttattgtattttagtttggataagagtgagattttattttaaaaataaaaataaaaa

SEQ ID NO: 14629 - DNA, 201 bp, Artificial Sequence
  Description of Artificial Sequence: Synthetic polynucleotide
tgtttttttttgttttgagatggagttttattttattgtttaggttggagtgtagtggtgttattttggtttattgtaatttttatttttygggttttagygatttttttgttttagttttttaagtagttgggattgtaggtgtttataattaygttyggttaatttttgtgtttttagtagagtyggagttttattatg

SEQ ID NO: 14630 - DNA, 201 bp, Artificial Sequence
  Description of Artificial Sequence: Synthetic polynucleotide
tgtttgttattaagtttagttaatttttgtatttttagtagagayggggttttattgtgttggttaggttggtttygaatttttgatttygtgattygttygttttggttttttaaagtgttaggattataagtgtgagttatygygttyggttttttaaatggtatttttgattttttttttttagtttttaaagtaggt

SEQ ID NO: 14631 - DNA, 201 bp, Artificial Sequence
  Description of Artificial Sequence: Synthetic polynucleotide
gttaaggtgggyggattatttgaggttaggagttygagattagtttggttaatatggtgaaattttatttttattaaaaatatggaaaaaattagtygggyggggttygagtttgtaattttagttatttgggagttgaggygygagaatygtttgaagtygggagggggaggttgtaggagtagaggttgtgttattgta

SEQ ID NO: 14632 - DNA, 201 bp, Artificial Sequence
  Description of Artificial Sequence: Synthetic polynucleotide
ggtttgtatggtgygtgattatttttagtggaagttttaatatgggtgtggtttagttttttagggttttttaaggtagaggtggttygggtttttgtagygattttataatatattttaattgtagayggtggagattgygggttgtttttyggtttaagyggttttggggttttygttttgygyggagttattygtgtt

SEQ ID NO: 14633 - DNA, 201 bp, Artificial Sequence
  Description of Artificial Sequence: Synthetic polynucleotide
gygttttgggttattgagagaagtgaaatattgtagatayggtagaggtgtttttttttttttttygtttttagatgtggtttttataygtaggttgatgygttttttttttatttaygtttgttyggttttgttatatatgtygttgtgttgtyggttttgaatgtgtatgagyggttygtgttggggttagyggaggtt

SEQ ID NO: 14634 - DNA, 234 bp, Artificial Sequence
  Description of Artificial Sequence: Synthetic polynucleotide
aggggttatatttatggatttttttttttttggtaggaagatgagtgattatattttygttattattgaattgagygttttgtttgttyggygttagtatygtttgtattattatttygattttatttattatygttyggyggatgggyggaggtttyggtaggtttgtgatatggtgtattattttattattgaagttatttaggaayggyggygggtattgygttagtaggg

SEQ ID NO: 14635 - DNA, 201 bp, Artificial Sequence
  Description of Artificial Sequence: Synthetic polynucleotide
ggggttttttgtttttagtatygttagtttaggtgtgttttttatggygtgatgygtttgtagatttggaaatattataggatttaggtattttayggagygttygttttgtgttagttttagtttagygttttttagatatygtttgatttttyggaggtagttatygatattgygtttattgtatagatgagaaagttg

SEQ ID NO: 14636 - DNA, 201 bp, Artificial Sequence
  Description of Artificial Sequence: Synthetic polynucleotide
tttttagtgagatgaattyggtattttagatggaaatgtagaaattattygttttttgygtygtttaygttgggagttgtagatyggagttgtttttattyggttattttggttttttttttttgttttttttttgagatagtgtttttttttatttttgttatttaggttgtagtgtagtggygyggtttgtgtttattg

SEQ ID NO: 14637 - DNA, 201 bp, Artificial Sequence
  Description of Artificial Sequence: Synthetic polynucleotide
taattttattttgtttttgagatagagtttygttttgtygtttaggttggagtgtagtggygtaatttyggtttattgtaagtttygtttttygggtttaygttattygtttgttttagttttttgaataattgggattataggygttygttattaygttyggttaaatttttgtatttttagtagagayggggttttatc

SEQ ID NO: 14638 - DNA, 201 bp, Artificial Sequence
  Description of Artificial Sequence: Synthetic polynucleotide
atttttagggttgyggatggtagaattaaaagagttaattagtaagtagaatygtttttttyggggttttaaggtttgagtattttttttggggtgttatygtatttttttyggggtgatatgtttggtttagttgtaagttttgtttagaatttgtttgtgtatyggtgtttggaatagttagttggattttatatttat

SEQ ID NO: 14639 - DNA, 201 bp, Artificial Sequence
  Description of Artificial Sequence: Synthetic polynucleotide
ggtttttgtagggagtttatattagtagttttttattttgaggagataygygggtttttttttygaagttygtttaggaggtagatggagygattygattyggaggataggagggtgtttaggggttttggygttatagtttttataggatgattttggagygtttttggatttygagttgttttggttaaggagtygtat

SEQ ID NO: 14640 - DNA, 201 bp, Artificial Sequence
  Description of Artificial Sequence: Synthetic polynucleotide
tatatataggygtggatatttatatggttttyggtagtgttgtaggaggttagtatagagaygtgttgaggagtttgagatgttygtttttttgggttatygygtgtaaaggttgttttygttgtggatttttatatgtgtgatatatatgaataggygaaayggataygtayggtttttatataygtgagttgggttttt

SEQ ID NO: 14641 - DNA, 201 bp, Artificial Sequence
  Description of Artificial Sequence: Synthetic polynucleotide
tttttgtgaaggtattaagtayggtagaygtttttatatygtyggggttygtttttttgtggaygggaagtgggaaygtgaygtggaygtgaygtgggaaygtaaygtgaygtgaygtgaygtgaygtggtatggygygaggatagygyggygggagyggygttttagatttagtagggagggagaygaaaggyggatgga

SEQ ID NO: 14642 - DNA, 201 bp, Artificial Sequence
  Description of Artificial Sequence: Synthetic polynucleotide
gttgggygtggtggtaygtgtttgtagttttagttatttaggaggttgaggtaggagaattttttgaattygggaygtagaggttgtagtgagttgagatygygttattgtattttagtttggtaatagagtgagatttyggtttaaaaaaaaaaaaaaagaaaaaaaaaaaaaaaagaaggagttgaggttttaagaatt

SEQ ID NO: 14643 - DNA, 201 bp, Artificial Sequence
  Description of Artificial Sequence: Synthetic polynucleotide
ttgtattttgtgggtaggggatattttttttagtggttggtgatgattgtgattttatttgtygagttttgtgggagtttyggtagtttttygtaattgtyggttggttgttattgttttagygtttgttttttgattggttagtaaattayggtggtagatagaaaaaagatagtttttttttttagggttgttttataa

SEQ ID NO: 14644 - DNA, 201 bp, Artificial Sequence
  Description of Artificial Sequence: Synthetic polynucleotide
ttttgttggygtattttgttggygtattttgttggygtattttgttggygtattttgttggygtattttgttggygtattttgttggygtattttgttggygtaagttgygttttgggattgggtttgaaaagggaggagttatttattttaagtttttaggttyggggagaattttatagtaagttttttgggagtttga

SEQ ID NO: 14645 - DNA, 686 bp, Artificial Sequence
  Description of Artificial Sequence: Synthetic polynucleotide
gtggtatttgtaggtttttaggattaggtagaggatttagtttttttaggattggggtttyggygttgygttttaggggaggtygaygggggttgggaggygtttagggygggaatttagygtaygggtgaggattttaaaaagtaaggggtaggatgagttaataaggttttgagtaggaaaattatgygataggaagtgtatatattgttttatagtagaaagatyggggaygggattagtttttaagygattttaaatttaaaaggaagtaatttttagatttttatgggygttttaatttgttttgggtgaaggaagataggtaagaatttttaggtttgtgaggattttaygttttagggatagaagtgttagggatttgggaagtgtagatttaatataaggtagagtaaaatttaygygtttyggtaggatttttattttaygtgatttattttygggtttgttgygtaggatagaagttagtttygggtggggttttygaatatggtggyggggtttgggtgggatagaggyggggygygaggyggagagattttgttttttagaataggtaaagggyggggtygggattagatttgtgtattttttygtttygtatttagygtttttgtttttygggtgtttggaggtgagagyggttaggaaggttgaggtatgat

SEQ ID NO: 14646 - DNA, 201 bp, Artificial Sequence
  Description of Artificial Sequence: Synthetic polynucleotide
gttagagtgtagtggtgygatttyggtttattgtaagtttygtttttygggtttaygttatttttttgttttagtttttttagtagttgggataggggtaygtygttaygttyggttagtttttgtatttttagtagagayggggttttattatattagttaggayggtttygattttttgatttygtgatttgttagttt

SEQ ID NO: 14647 - DNA, 201 bp, Artificial Sequence
  Description of Artificial Sequence: Synthetic polynucleotide
gttagagattttgtttttaaaagtaaaaaagaaaaaaaaagtttttttttaagttattatatattttgaataattaatattgaaaattgttggtygggygyggtggtttaygtttgtaattttagtattttgggaggtygaggyggggyggattaygagattagtagaayggygtgaattyggaaggyggagtttgtagtg

SEQ ID NO: 14648 - DNA, 201 bp, Artificial Sequence
  Description of Artificial Sequence: Synthetic polynucleotide
ttgtatttttatttgaggtatygggtttattttattagggagtgttagatagtgggygtaggttagtgggtgygtgtatygtgtgygagtygaagtagggygaggtattgttttatttgggaagygtaaggggttagggagttttttttttgagttaaagaaaggggtgayggaygtattttgaaaatygggttattttta

SEQ ID NO: 14649 - DNA, 201 bp, Artificial Sequence
  Description of Artificial Sequence: Synthetic polynucleotide
aygtatttattgatttgygtttattgtttggtagtttttagtgagatgaattyggtattttagttggaaatgtagaaattattattttttgtgtygtttaygttgggagttgtagatyggagttgtttttattyggttatgttggttttttttttggatataattatttttgtatttatttaatttttatttttatggaat

SEQ ID NO: 14650 - DNA, 201 bp, Artificial Sequence
  Description of Artificial Sequence: Synthetic polynucleotide
tttttatgtgattattgtttgtttgttagygttagttttttttgattttaaattataagtggaagaaagtaygttagaaatttatagaattggttyggygyggtggtttaggtttgtaattttagtattttgggaggtygaggtaggyggattaygaggttaggagatygagattattttggttaatagggtgaaatttyg

SEQ ID NO: 14651 - DNA, 201 bp, Artificial Sequence
  Description of Artificial Sequence: Synthetic polynucleotide
aagttttttttttttttttttttttttttttttgagayggagttttattttttygtttaagttggattgtagtggygttatttyggtttattgtaagtttygttttttgggtttatgttatttttttgttttagtttttygagtagttgggattataggygtttattattaygttyggttaattttttgtatttttagtag

SEQ ID NO: 14652 - DNA, 201 bp, Artificial Sequence
  Description of Artificial Sequence: Synthetic polynucleotide
ygtttggtgtatgttgtggagggygtgggtaatggygtatatygtattaattataaattgtattttgtttttttgttygtaggtggagtttyggtygatgygtttttygtttgttttagggatgtttagagaaagtgtgttyggtttttatgtatygaattyggtttttygttttttttttttttatttttattatttttt

SEQ ID NO: 14653 - DNA, 201 bp, Artificial Sequence
  Description of Artificial Sequence: Synthetic polynucleotide
gattttagggggttttattttagyggttttttttattttttttgtagagaaaaaagagtgtyggygggattatygtttatygtgtgtttaggaggygtttygtaatatggtgtattttaatgtgatttgygatggttgtaatgggtttgtggtaggaattygttataagtgtagygtttgtttagattaygatttgtgtag

SEQ ID NO: 14654 - DNA, 201 bp, Artificial Sequence
  Description of Artificial Sequence: Synthetic polynucleotide
ggtattttatttatttagagatagagtttygttgygaygtttaggttggagtgtatggygtaattttggtttattgtaggtttygtttttygggttttagygatttttttgttttagtttttygagtagttggggttatagttatgtgttattaygtygggttaatttttgtatttttagtagagatagggtttttttata

SEQ ID NO: 14655 - DNA, 201 bp, Artificial Sequence
  Description of Artificial Sequence: Synthetic polynucleotide
ttattatgtttaattaattttttttatttgtagtagagatagggttttattgtgttagttaggatggtttygattttttgattttgtgattygygtgtttyggttttttaaagtgttgggattataggygtgagttatygygttyggtttgtaaatattttttgygttttagtgggttatgtttttattttgttgattgtt

SEQ ID NO: 14656 - DNA, 227 bp, Artificial Sequence
  Description of Artificial Sequence: Synthetic polynucleotide
ttagttttttgagtagttggaattataggtgttygttattaygttyggtttattttttgtatttttagtagagayggggttttattatgttagttaggatygttttgattttttgatttygtgattygtyggtttyggttttttaaagtgttgggattataggygtgagttattaygtttagttttagaaattgaaatgtatattattaagtgaaagaagttaattt

SEQ ID NO: 14657 - DNA, 201 bp, Artificial Sequence
  Description of Artificial Sequence: Synthetic polynucleotide
tttttttttagttttgttgttattttgtagtttgattttagattgttgtgttagtaattagygagatttygagttaggtgtgggatataatttygtggtgygtygttttttaagtyggtyggaaaagygtaatattygggtgggagtgattygattttttaggtgygttygttatttttttttttgattyggaaagggaat

SEQ ID NO: 14658 - DNA, 201 bp, Artificial Sequence
  Description of Artificial Sequence: Synthetic polynucleotide
aggtgygtttgttatttttttttttgattyggaaagggaattttttgattttttgygttttttaagtgaggtaatgtttttttttgtttyggttygygtayggtgtatgtttttattgatttgygtttattgtttggtttttttaagtgagatgaattyggtattttagatggaaatgtagaaattattygttttttgygt

SEQ ID NO: 14659 - DNA, 201 bp, Artificial Sequence
  Description of Artificial Sequence: Synthetic polynucleotide
tgtttttttgttttagtgtttatattgtaaaaaagtgttttttttatygggygyggtggtttaygtttgtaattttagtattttgggaggtagaggygggyggattaygaggttaggagatygaaattattttggttaatayggtgaaatttygtttgtattgtgaatataaaaaattagtygggygtggtggygggtgtt

SEQ ID NO: 14660 - DNA, 201 bp, Artificial Sequence
  Description of Artificial Sequence: Synthetic polynucleotide
gtygggygtggtggygggtatttgtagttttagttattygggaggttgaggtaggagaatggggtgaattygggaggyggagtttgtagtgagtygagatygygttattgtattttagtttgggtgatagagygagattttattttaaaaaaaaataatattaggattgaagtttgttttttaatttttagtgatayggtt

SEQ ID NO: 14661 - DNA, 201 bp, Artificial Sequence
  Description of Artificial Sequence: Synthetic polynucleotide
tgaataagaaagggttattatattttattttgaaatggtttttggagaaagaatggaagtaaattgtataagtgggygtttatttttttttattyggttayggttatygtggtgttyggttaggtttttggtgaygtgaggtaaattttttygttggtaaattagtttatatattttttttattgtagayggttatttaga

SEQ ID NO: 14662 - DNA, 201 bp, Artificial Sequence
  Description of Artificial Sequence: Synthetic polynucleotide
ttaagtatttttttgtgattygtttagaggaatttttggtagtggggatggygttatttttatttgagagatgaggagattgaggtttagaggggggaygyggtttgttygagttatattgattgagaggggtagatttggattygtttgtagtttaagtttttagagattttggtgtggtttgtygggtagttagtttgt

SEQ ID NO: 14663 - DNA, 201 bp, Artificial Sequence
  Description of Artificial Sequence: Synthetic polynucleotide
gtgtgattttggaggggtaagaattatttyggtagttatgggggagtttaygagtgtttgataagaggttaygtttttttgggattttttagaaagttagyggaggggtyggggatagtagttgttttgggtttaaggtgagtagtattgtygtttttgaggatggygtgtaggtgaaggtattgtygattttaggttggg

SEQ ID NO: 14664 - DNA, 201 bp, Artificial Sequence
  Description of Artificial Sequence: Synthetic polynucleotide
ttyggatatttaggttattttygaattttaaggtttttaatygtagttataygtatagaggtttttttgttatgtggggtaatayggttatagggtaagayggttaygggttttagatatttttgggttattattttgtttatygtaggtggatatagttatggaatggaagtaatttttttgattatttayggtagtttt

SEQ ID NO: 14665 - DNA, 201 bp, Artificial Sequence
  Description of Artificial Sequence: Synthetic polynucleotide
gattttttygagtttgtygggagatagttaygttaatggttataaygggtatagygtttaggaaygtagtaatttagttagtygttagttttttttttggygygggtattatttaaygygtttatttggggtttagatgygataaattggtygagggattttgggttttggttgggaygagygtagtaaatttgtygttat

SEQ ID NO: 14666 - DNA, 201 bp, Artificial Sequence
  Description of Artificial Sequence: Synthetic polynucleotide
ttttgaatagtagtaggtagtagagttttagggagagtaggttttygtggtgtagtattayggttttgtgttttatttyggagaagttgayggagatgtgygtttyggggatgggttttaggattagttttttygyggtttggtygttgttygggagyggttgtyggyggatggtgtagtgtagaggtaggatgtyggggg

SEQ ID NO: 14667 - DNA, 201 bp, Artificial Sequence
  Description of Artificial Sequence: Synthetic polynucleotide
atagggttttattttgttagttaggatggtttygattttttgatttygtgattygttagtttyggttttttaaagtgttgggattataggygtgagttatygtattgggttggtagttattttttttaagtagtagttttattttttagtataaattaatgttgtagtttttaaattatttgttgaagtgtttttgaattt

SEQ ID NO: 14668 - DNA, 201 bp, Artificial Sequence
  Description of Artificial Sequence: Synthetic polynucleotide
ttttttttttttttttgagatagaattttgttttgttgtttaggttggagtatagtggtgygatattagtttattgtaaattttatttttygggtttaagygatttttttgttttagttttttgagtatttgggattatagggagtgtttttatatttggttaattttttgtatttttagtagagatagggttttatygtg

SEQ ID NO: 14669 - DNA, 201 bp, Artificial Sequence
  Description of Artificial Sequence: Synthetic polynucleotide
aatagttgggygyggtggtttatatttgtaattttagtattttgggaggttgaggygggtagattaygaggttaggaaatygagattattttggttagtayggtgaaatttygtttttattaaaaatataaaaaaaattagtygggygttgtggyggaygtttgtagttttagttatttttaaggttgaggtaggagaatg

SEQ ID NO: 14670 - DNA, 201 bp, Artificial Sequence
  Description of Artificial Sequence: Synthetic polynucleotide
ttgattyggaaagggaattttttgattttttgygttttttaagtgaggtaatgttttgttttgttttggttggygtayggtgygygtatttattgatttgygtttattgtttggttttttttagtgagatgaattyggtattttagatggaaatgtagaaattattygttttttgtatygtttaygttgggagttgtagat

SEQ ID NO: 14671 - DNA, 201 bp, Artificial Sequence
  Description of Artificial Sequence: Synthetic polynucleotide
tttttattttgttttttagatagaatttygttgtgttatttaggttggagtgtagtggygtgattttggtttattgtaatttttgtttttygggtttaygygatttttttgttttagttttttaagtagttgggattgtaggtgtgtattattatgtttatattaagtttttgtatttttagtagagatggggttttgtta

SEQ ID NO: 14672 - DNA, 201 bp, Artificial Sequence
  Description of Artificial Sequence: Synthetic polynucleotide
tagtgaaatttygtttttattaaaaatataaaaaattagttyggygtggtgaagggtatttgtagtygtagttatttaggaggttgaggtaggagaatggygtgaattygggaggtggagtttgtagtgaatygagattaygttattgtattttagtttgggygatagagtgagattttgttttaaagaaatagaagattt

SEQ ID NO: 14673 - DNA, 201 bp, Artificial Sequence
  Description of Artificial Sequence: Synthetic polynucleotide
ttttgtgaaaaataaaaaaaataagtygggygyggtggtttaygtttgtaattttagtattttgggaggtygaagtaggtagattaygaggttaggagatygagattattttggttaaygyggtgaaatttygtttttattaaaaatataaaatattagtygggygtagtggygggygtttgtagttttagttattyggga

SEQ ID NO: 14674 - DNA, 201 bp, Artificial Sequence
  Description of Artificial Sequence: Synthetic polynucleotide
gagttaaagtgataygtttgtttgggttttttaaagtgttggaattatagatttgagttatygggtttagtttaattattttttttagtttgagtatgagygtyggaagaaaagtttttatttgtatttattttttttagatatagggtttttttttgttatttaggttggagagtagtggygtaattttygttyggttta

SEQ ID NO: 14675 - DNA, 201 bp, Artificial Sequence
  Description of Artificial Sequence: Synthetic polynucleotide
ggagtatgaggtaggagagttatttgaattygggaggtagaggttgttgtgagtygagattatatttttttattttagtttgagtggtagagtaagatttygttttaaaaaaaaaaaaaaaaagttgggggaaggagagaaaaatagagagtttagtggggtaattttttatttagtttttgttatttgttattgttttag

SEQ ID NO: 14676 - DNA, 201 bp, Artificial Sequence
  Description of Artificial Sequence: Synthetic polynucleotide
atatttggtttttgggatttgtatatttttgttttttttgggtggaaagayggtttttttgattagggtttttttgtgttttagagggtaygttttttttygtaagtgtgagtygtatattagtgagtatgtgtttttatttttagggatatyggttattaggtttggggttagatggtaggattttygttttttttttta

SEQ ID NO: 14677 - DNA, 201 bp, Artificial Sequence
  Description of Artificial Sequence: Synthetic polynucleotide
ttataggygttygttattaygttyggttaattttttgtgttttgtttagtagagayggggttttatygtattagttaggatggtttygatttgttgatttygtgattygttygtttyggttttttaaagtgttgggattataggygtgagttattttgygttyggtttttttatttttatattttaaattagagatgattt

SEQ ID NO: 14678 - DNA, 217 bp, Artificial Sequence
  Description of Artificial Sequence: Synthetic polynucleotide
tataggygttttttattaygttyggttaattttttgtatttttagtagagayggggttttatygygttagttaggatggtttygattttttgattgagatygygtttttttgatygygttyggtygattttttttttttttttatttgttttttttttttttattattattaaaagtttattgttttatatttttttttttttaattttatttaaaa

SEQ ID NO: 14679 - DNA, 217 bp, Artificial Sequence
  Description of Artificial Sequence: Synthetic polynucleotide
ggtttatagtttttagtttgagygaygtagaagaygggtgatttttgtatttttatttgaggtatygggtttattttattagggagtgttagatagtgggygtaggttagtgagtgygtgtatygtgygygagtygaagtagggygaggtattgttttatttgggaagggtaaggggttagggagtttttttttttagttaaagaaaggggtgaygg

SEQ ID NO: 14680 - DNA, 201 bp, Artificial Sequence
  Description of Artificial Sequence: Synthetic polynucleotide
gttygttattaygttyggttaaatttttgtatttttagtagagatggggttttattttgttaattaggatggtgtygattttttgatttygtgattygttygttttggttttttaaagtgtygggattataggygtgagttattgygttyggtttggaaattgttttttatgtagttgatttattttaatttttattagta

SEQ ID NO: 14681 - DNA, 201 bp, Artificial Sequence
  Description of Artificial Sequence: Synthetic polynucleotide
tatatgattttgaataagttttgaattatttatatgtgatttttyggttttatatgaggtagaatagtayggtgtggatygggaattttgaygtgggagtygaaagatggggaggttgtgggtayggttttyggagtttygggattgagatatgtaggtattttagaygggtttgttgttataataagtgggaaattttta

SEQ ID NO: 14682 - DNA, 201 bp, Artificial Sequence
  Description of Artificial Sequence: Synthetic polynucleotide
tttagagaagattyggtagtttttttagttttyggtttttgttttygttttttttttttttgtttttaggttttttttttgtagttttttagttttttatygygttttgygtttttggttttttttttttttagtgttttttttatttggygtygttyggtygtaattttggtttttttggggaagaggttyggattttat

SEQ ID NO: 14683 - DNA, 201 bp, Artificial Sequence
  Description of Artificial Sequence: Synthetic polynucleotide
tgtttttatattggaaaaatttaaatatttttaagagtttgattattggtygggygyggtggtttaaygtttgtaattttagtattttgggaggtygaggyggtyggattataaggttaggagatygtgattattttggttaatayggtgaaatttygattttattaaaaaaatataaaaaaattagtygggygyggtggc

SEQ ID NO: 14684 - DNA, 201 bp, Artificial Sequence
  Description of Artificial Sequence: Synthetic polynucleotide
gatttggttgtttagaagygtgtgttatttyggattgagttaagatggtygaataggaatagtttyggtttatagtttttattgtgagygaygtagaagaygggtgatttttgtatttttatttgaggtatygggtttattttattagggagtgttagatagtgggtgtaggttagtgggtgygygtatygtgygtgagtt

SEQ ID NO: 14685 - DNA, 201 bp, Artificial Sequence
  Description of Artificial Sequence: Synthetic polynucleotide
ttttggtygggygtygtggtttaygtttgtaattttagtgagaggtgatagtatgttggtagttttygtagtttttttttattagygygattttygggtgygygtgggttgggttggttygtatttggagyggttagtagtttygggtagtgaggggtttagtatttgggttagtagttgttgtgttygatttttygttag

SEQ ID NO: 14686 - DNA, 201 bp, Artificial Sequence
  Description of Artificial Sequence: Synthetic polynucleotide
tgtggtygggygyggtggtttatttttgtaattttagaattttgggaggtygaggygggyggattaygagattagtagattgagattattttggttaatayggtgaaatttygtttttattaaaaatatagaaaaagtagtygggygtggtggygggtatttgtagttttagttataggttgaggtagaagaatggygtga

SEQ ID NO: 14687 - DNA, 201 bp, Artificial Sequence
  Description of Artificial Sequence: Synthetic polynucleotide
tttyggttttttaaagtgttggggttataggygtgagttatygygttyggttagtygtttttattaaaaatataaaaaattagtttggygtggtggygggygtttgtagttttagttatttyggaggttgaggtaggggaattgtttgaatttatgaggyggaggttttaagtygaggtygtgttattgtattttagtttg

SEQ ID NO: 14688 - DNA, 201 bp, Artificial Sequence
  Description of Artificial Sequence: Synthetic polynucleotide
ggttggagtgtagtggygtgatttyggttygttataatttttattttttagtagtttgttttggttttttaaagtgtygagattgtagtttttgttyggtygttatttygtttgagaagtgaggagygtttttgtttggtygttattttatttaggaagtgaggagygttttttttyggtygttattttatttgggaagtg

SEQ ID NO: 14689 - DNA, 201 bp, Artificial Sequence
  Description of Artificial Sequence: Synthetic polynucleotide
gttttagttgttttttygyggggtagggttygggatttgtagttygttatgtttgagttttttatttttttygtgggtttttgtgyggttygagttttttygaygagygttattttttgttttayggtatttagttttattgattatttaagggttgaggagtgygggygtatagtatygggattggtaggtagttttatt

SEQ ID NO: 14690 - DNA, 286 bp, Artificial Sequence
  Description of Artificial Sequence: Synthetic polynucleotide
gaagaygggtgatttttgtatttttatttgaggtatygggtttattttattagggagtgttagatagtgggygtaggttagtgggtgygygtatygtgygygagtygaagtagggygaggtattgttttatttgggaagygtaaggggttagagagtttttttttygagttaaataaatgggtgayggaygtatttggaaaatygggttatttttattygattattgygttttttagatyggtttaaaaaayggtgtattaygagattatattttatatttggttc

SEQ ID NO: 14691 - DNA, 201 bp, Artificial Sequence
  Description of Artificial Sequence: Synthetic polynucleotide
gttttagttgtttttttgyggggtagggtttgggatttgtagtttgttatgtgtgagtttttttttattgttttaggtttttgtgtagtaggagttttttygaygagtatygttttttgttttatggtattyggttttatygattgtggaayggttgaggagygtgggtataaggtatgggattggtaggtagttttgttt

SEQ ID NO: 14692 - DNA, 201 bp, Artificial Sequence
  Description of Artificial Sequence: Synthetic polynucleotide
ggagtgtaatggtattatttyggtttattgtaattttygtttttygggtttaggygatttttttgttttagtttttygagtatttgggattataggygygygtttttaygtttaattaatttttgtatttttagtagagayggagttttattatgttggttaggttygtttygaatttttgatttygtgatttattygttt

SEQ ID NO: 14693 - DNA, 201 bp, Artificial Sequence
  Description of Artificial Sequence: Synthetic polynucleotide
ttttygttatttttttttttgattyggaaagggaattttttgattttttgygtttttygagtgaggtaatgtttygttttgtttyggttygygtatattgygtatatttattgatttgygtttattgtttggtattttttagtgagatgaattyggtattttagatggaaatgtagaaattattygttttttgygtygttt

SEQ ID NO: 14694 - DNA, 201 bp, Artificial Sequence
  Description of Artificial Sequence: Synthetic polynucleotide
gaygtagaagaygggtgatttttgtatttttatttgaggtatygggtttattttattagggagtgttagatagtgggygtaggttygtgggtgtatgtatygtgtgygagttgaagtagggygaggtattgttttatttyggaagygtagggggttagggagtttttttttttagttaaagaaaggggtgatagayggtat

SEQ ID NO: 14695 - DNA, 201 bp, Artificial Sequence
  Description of Artificial Sequence: Synthetic polynucleotide
tttagttaattttttttatatttttaatagagatagggttttattatgttggttaggatagttttgattttttgatttygtgattygttygtttyggtttygtaaagtgttgggattataggygtgagttatygtattyggttggaagtatatattttaatagttttatatagtagttgttgttagaatttaaatgaagat

SEQ ID NO: 14696 - DNA, 201 bp, Artificial Sequence
  Description of Artificial Sequence: Synthetic polynucleotide
tagaagaygggtgatttttgtatttttatttgaggtatygggtttattttattagggagtgttagatagtgggygtaggttagtgtgtgtgygtatygtgygygagtygaagtagggygaggtattgttttatttgggaagygtaaggggttagggagttttttttttgagttagggaaaggggtgayggatggtatttgg

SEQ ID NO: 14697 - DNA, 201 bp, Artificial Sequence
  Description of Artificial Sequence: Synthetic polynucleotide
ttggtagggtyggtyggttgtttttagtgyggggtttgttaagtttaygtttattyggaattttagttggttygtaagtattatgtatagtttgggttttygtttaygtttttttatttatatttttttgtaagttgagggagygggttttggttttggttagtttagaaaggggtttttatagtgtagyggtgggttgaa

SEQ ID NO: 14698 - DNA, 201 bp, Artificial Sequence
  Description of Artificial Sequence: Synthetic polynucleotide
tttgagattttygtagtttyggggtttgagttgaggggttatyggtagtgtygtgggagttaggttgttttttyggaagttaggttgtttttgagtagagyggaggttttatygtttttyggggggtayggtggtagtttttaggttgtattggggttggatgagttgggggtggagtataaggggttagttttttttttt

SEQ ID NO: 14699 - DNA, 201 bp, Artificial Sequence
  Description of Artificial Sequence: Synthetic polynucleotide
aaatttttygtttgtagggggygggtggggaggtggaggaggggttgggttaaaygttgggggtgtgattyggggttgygggttttygggttttagttttygggtttgtygagtgggygagtggggtgttttattttttgyggttttttttyggtttttatagaatatggagaaggygattttgtygtyggtgaygtttat

SEQ ID NO: 14700 - DNA, 201 bp, Artificial Sequence
  Description of Artificial Sequence: Synthetic polynucleotide
gggygtttgtagttttagttattygggaggttgaggtaggagaatggtatgaattygggaggyggagtttgtagtgagtygagatygygttattgtatttyggtttgggygatagagygagatttygttaaaaaaaaaaaaaaaaagtagttttgtaagattaggtgtttggtagataggtatatttagtaaagttataat

SEQ ID NO: 14701 - DNA, 210 bp, Artificial Sequence
  Description of Artificial Sequence: Synthetic polynucleotide
ttattaaaaatataaaaaaattagtttggygyggtggygggygtttttagttttagttgttygggaggttgaggtaggagaatggygtgaattygggaggyggagtttgyggtgagtygagattttgttatagtattttagttygggygatagagtgagatttygttttagaaaaaaaaaaaaaaaaaaaaaagaagtgggaatttagaa

SEQ ID NO: 14702 - DNA, 201 bp, Artificial Sequence
  Description of Artificial Sequence: Synthetic polynucleotide
tttygggtttaygttattttttygttttagtttttygagtagttgggattataggtattyggttaattttttgtattttttatagagayggggtttttatygtgttagttaggatggttttgattttttgatttygtgattygtttgtttgggttttttaaagtgttgggattataggygtgagttatygygtttagtttg

SEQ ID NO: 14703 - DNA, 201 bp, Artificial Sequence
  Description of Artificial Sequence: Synthetic polynucleotide
gatygttttttygttattgtatttatataatttgttttaaatgggtaatttattaagtatattttgtttttgttttygtygtaggtttttgtyggatygtygtttataagtttttatagttygtgagtttttttagtttggttyggtttattttgtggygtttaygtttatttygggtttttttygatttttttttaattt

SEQ ID NO: 14704 - DNA, 201 bp, Artificial Sequence
  Description of Artificial Sequence: Synthetic polynucleotide
gtagtgtagtggygtaatttyggtttattgtaagtttygtttttygggtttaygttatttttttgttttagttttygggttagttgggattataggygttygttattgtgttaggttaattttttgtatttttagtagagatggggttttattatattagttaggatggtttygattttttgatttygtgatttattygtt

SEQ ID NO: 14705 - DNA, 201 bp, Artificial Sequence
  Description of Artificial Sequence: Synthetic polynucleotide
ttygtgtttttttttttygagtyggygggttatagaygtyggaagaaattttygtatttgtagttggaattgtagtttayggygtttyggttttttttttygttttgtttttttttggttaaataatatattaaagaggygaggtaatgattgttggttagtttttatyggggaaaaatttattgttaggatggtatgaat

SEQ ID NO: 14706 - DNA, 201 bp, Artificial Sequence
  Description of Artificial Sequence: Synthetic polynucleotide
ggaataaatatttttgttttataaagatttagaatttattggatattgataaaatgtttattagaggtyggygtagtggtttatgtttataatttyggygyggtggtttatatttgtaatttygaygtggtggtttatatatgtaattttagtatttygtaaggttaggtggggggattatttgagtttaggagtttatga

SEQ ID NO: 14707 - DNA, 201 bp, Artificial Sequence
  Description of Artificial Sequence: Synthetic polynucleotide
gtggtgtaattttggtttattgtaagttttgtttttygggtttatgttatttttttgttttaggttttygagtagttgggattataggtgtatattattaygttyggttaatttttttgtatttttagtaaagayggggttttattatgttagttaggatggtttygattttttgattttgtgatttattagttttagttt

SEQ ID NO: 14708 - DNA, 201 bp, Artificial Sequence
  Description of Artificial Sequence: Synthetic polynucleotide
gtaaattttttgtaaaattttggttttttagattttagttgggtttttttttttaggtttttagtggtagttgtgttttttgtgtgtttaygtyggttagygtaagttatatatggatttagtgtttattgtatttttgttagttttagggttttagttygttgtttygggagattttagttttggtttaggtattttttt

SEQ ID NO: 14709 - DNA, 201 bp, Artificial Sequence
  Description of Artificial Sequence: Synthetic polynucleotide
ttttaatttttttattaagatggagttttgttttatygtttaggttggagtgtagtggygygattayggtttattataattttygtttttygggtttaagygatttttttgttttagtttttygagtagttgggattataggtatgtgttattatgtttaggtaattttagtatttttagttgagayggggttttattatg

SEQ ID NO: 14710 - DNA, 201 bp, Artificial Sequence
  Description of Artificial Sequence: Synthetic polynucleotide
ttttgttaggygyggtggtttatgtttgtaattttagtattttggaaygtygaggtaggygaattaygaggttaagagatygagattatttttgttaatayggtgaaatttygtttttattaaaaatataaaaaattagtygggygtgggggygggygtttgtagttttagttgttygggaggttgaggtaggagaatygt

SEQ ID NO: 14711 - DNA, 201 bp, Artificial Sequence
  Description of Artificial Sequence: Synthetic polynucleotide
attattttttttttttttgagayggagttttgttttgtygtttaygttggggtgtagtggtaygatttyggtttattgtaagtttygtttttygggtttaygttatttttttgttttaatttttygagtagttgggattataggtatatgttattatattyggttaatttttttgaatttttagtagagaggggttttatt

SEQ ID NO: 14712 - DNA, 201 bp, Artificial Sequence
  Description of Artificial Sequence: Synthetic polynucleotide
ttygygaattygggtggtgttttttttttgtattatttagaygtgtttttaggaaggaygtgttgttatgattygttatggtggtttyggggatggttagyggygggatgatgggtgtgatgtggtttyggggatggttagyggtaggatgatgggtgtgaygtatttgtgttatttgggatttaaatttatttatgattt

SEQ ID NO: 14713 - DNA, 201 bp, Artificial Sequence
  Description of Artificial Sequence: Synthetic polynucleotide
attgggttttatygtgttagttaggatggtttygattttttgattttgtgattagttygtttyggttttttaaagtgttggtattataggygtgagttatygttttyggtaaagttttttttygatggttttagtttgttggataagttaggaataaggttattggttgtaagggaggaggagtttttgtaggtggtagyg

SEQ ID NO: 14714 - DNA, 201 bp, Artificial Sequence
  Description of Artificial Sequence: Synthetic polynucleotide
ggtgatttaaatygtttatgtggaatatatatatatatatatatatatatatatatgtgttttagggayggatatatataaataygtgttttaggggtttygtgtgaggagaggagatttatattattgatttagtaattagggtygattttagagggttggagtatatatttygggttgaygataggygtttggttttgg

SEQ ID NO: 14715 - DNA, 201 bp, Artificial Sequence
  Description of Artificial Sequence: Synthetic polynucleotide
tttyggttygtttttttttattttaggttgttttaatttttttttgaaagtttggygtttattttttattttttgggaaatattttgtygttttggggtgygtttygtgaaggagataygttgggtgaaagttagggattttataattatttttygtttttatttygggtttagtgtaggggttgtygtgaaggtattggt

SEQ ID NO: 14716 - DNA, 201 bp, Artificial Sequence
  Description of Artificial Sequence: Synthetic polynucleotide
aggttgttgggaaggaattggtttttatggaagtgttttagtttttttgttttttyggtttttttttttyggttgttttagtgttttattgaaagtttggygttatatttttatttttygggaaattttatgtttttttggggtgtttttygtggggaagataygtattttgggtgaaagttagggattttatgaatattt

SEQ ID NO: 14717 - DNA, 201 bp, Artificial Sequence
  Description of Artificial Sequence: Synthetic polynucleotide
attaatttaaatatttattaatgatagattggataaagaaaatgtggtggggtggagttaagatggtygaataggaatagtttyggtttatagtttttagygtgagygaygtagaagatgggtgatttttgtatttttaattgaggtaaygggtttattttattggggagtgttggatagttggtgtaggatagtgggtgt

SEQ ID NO: 14718 - DNA, 201 bp, Artificial Sequence
  Description of Artificial Sequence: Synthetic polynucleotide
gttygttattatattyggttaattttttgtatttttaatagagayggggttttatygtgttagtaaggatggtttygattttttggtttygtgattygttygygtyggtttttygaagtgttgggattataggtatgagttatygygttyggttagaagtgtttttatttgtttgggaagttgtttttttttggtatttgt

SEQ ID NO: 14719 - DNA, 201 bp, Artificial Sequence
  Description of Artificial Sequence: Synthetic polynucleotide
ttttttattttaaggaataagtttttaattagattagatatagttataagtaaatataaattatgtttttatgtaattttaagagttattttaggtygggygyggtggtttatgtttgtaattatagtattttyggaggtygtggygggyggattaygaggttaggagattgagattattttggttaatatggtgaaatta

SEQ ID NO: 14720 - DNA, 201 bp, Artificial Sequence
  Description of Artificial Sequence: Synthetic polynucleotide
ggttaattaggggtaygtttttttatgtatatggygggtatttttattttagttggtyggtagtggtatygtatatggtattttatatttgtatttttttygttttggtttagtgtggttagggatgggttttgttagtttgtagygttattygttttgtgtaaggtttagaattgtttatttaygtaagtygggagttyg

SEQ ID NO: 14721 - DNA, 366 bp, Artificial Sequence
  Description of Artificial Sequence: Synthetic polynucleotide
tgagygaygtagaagaygggtgatttttgtatttttatttgaggtatygggtttattttattagggagtgttaggtagtgggygtaggttagtgggtgygygtatygtgggygagtygaagtagggygaggtattgttttatttgggaagygttaggggttagggagtttttttttygagttaaggaaaggggtgatygaygtatttagaaaatygggttatttttattygaatattgygttttttagatyggtttaaaaaatggygtattaygagattatattttatatttggtttggagggttttaygtttayggaattttattgattgttagtatagtagtttgagattaaattgtaaggygg

SEQ ID NO: 14722 - DNA, 201 bp, Artificial Sequence
  Description of Artificial Sequence: Synthetic polynucleotide
ataaaggttttttaagtttatattagatttaygagtttagttggttttatttagtggatttygtatygggggtygtaggtggagttgtttgttagtttygygtagtgtttttatagtttttagtttttgggyggtygatgggatygggygtygtggagtagggggtagygtttattggggaggttyggttttgtaggagtt

SEQ ID NO: 14723 - DNA, 201 bp, Artificial Sequence
  Description of Artificial Sequence: Synthetic polynucleotide
ggtgtygtttgttatttttttttttgattaggaaagggaattttttgattttttgtgttttyggagtgaggtaatgtttygttttgtttyggttygygtgyggtgygttgtatttattgttttgygtttattgtttggtattttttagtgagatgaattyggtattttatatggaaatgtagaaattatttattttttgyg

SEQ ID NO: 14724 - DNA, 201 bp, Artificial Sequence
  Description of Artificial Sequence: Synthetic polynucleotide
gtygttttgtagtttgattttagattgttgtgttagtaattagygagatttygtgggtataggatttttygagttaggtgygggatataatttttaggtgygtygttttttaagtttgttggaaaagtgtagtatttyggttggagtgattygattttttaggtgttgtttgttatttttttttttgattgggaaagggaa

SEQ ID NO: 14725 - DNA, 384 bp, Artificial Sequence
  Description of Artificial Sequence: Synthetic polynucleotide
ttgaattgttttaattttaagyggtttagttttaagttttgygagagtattatyggttagggtttgtagatygtggtygttaattgttttgatttttagaygttgaatgtttaggattgygaggttttygtggaggttttgygttttgttaaaygttattgtaagygttgygttatygagtatattaattyggtttttttttgaagggatagagtttattyggygttgtatttatataaatttgaataaagtaaatttttttaaaagtagygtatgtaagtatygatatttatttaaaatagttttttttttygggaaggttattaggaatttggtttttatttttttttattttttatgggtaatagaggttaaagaaaygaa

SEQ ID NO: 14726 - DNA, 216 bp, Artificial Sequence
  Description of Artificial Sequence: Synthetic polynucleotide
gaagaygggtgatttttgtatttttatttgaggtatygggttaattttattagggagtgttagatagtgggygtaggttagtgggtgygygtatygtgygygagtygaagtagggygaggtattgttttatttgggaagygtaaggggttagggagtttttttttygagttaaagaaaggggtgatggaygtagttggaaaatygggttattttta

SEQ ID NO: 14727 - DNA, 334 bp, Artificial Sequence
  Description of Artificial Sequence: Synthetic polynucleotide
tgatatagaagayggtgatttttgtatttttatttgaggtatygggtttattttattagggagtgttagatagtgggtataggttagtgggtgygygtatygtgygygagtygaagtagggtaaggtaatgttttattygggaagygttaggggttagggagtttttttttttagttaaagaaaggggtgayggaygtatttggaaaatygggttatttttattygaatattgygtttttyggatyggtttaaaaaayggygtattaygagattatatttygtatttggttyggagggttttattygayggagtttygttgattgttagtatag

SEQ ID NO: 14728 - DNA, 201 bp, Artificial Sequence
  Description of Artificial Sequence: Synthetic polynucleotide
gggattttaaggttttgttggtgyggtttaaaggtatyggaygttggggttaagatgattttygygttgttatgaattaggttattggaygygggtttygygtygagtttgtagttttygaggagtttttygggttttttygttttgattatattttttyggatggttgtygggtttttgtttgtttygttttgtatygag

SEQ ID NO: 14729 - DNA, 270 bp, Artificial Sequence
  Description of Artificial Sequence: Synthetic polynucleotide
gttattgtattttagtatgggtgatagagttagtttgaaattttgttttgygtttttttgagaagtgatagtgtatyggtatggtagtttttatagttttygttygtttttggygttttttyggttttggtatttattttggtygygtttgaggagttttttagttygtygttgtattgtggaagtttatttttgggttggttaaggtyggagtyggtttttttagtttgyggggaggtgtggagggagaggtaygggygggaatygggg

SEQ ID NO: 14730 - DNA, 253 bp, Artificial Sequence
  Description of Artificial Sequence: Synthetic polynucleotide
ygtgagygaygtggaagataggtgatttttgtatttttatttgaggtatygggtttattttattagggagtgttagatagtgggygtaggttagtgggtgygygtatygtgygygagtygaagtagggygaggtattgttttatttgggaagygtaaggggttagggagtttygttttygagttaaagaaaggggtgayggaygtatttggaaaatygggttatttttatyggaatattgygttttttygatc

SEQ ID NO: 14731 - DNA, 204 bp, Artificial Sequence
  Description of Artificial Sequence: Synthetic polynucleotide
ttttagtaggggyggtygggtagaggygttttttatttttyggayggggyggttggtygggtaggggggttgattttttttatttttttttyggayggggyggyggtaaagattgagatagtttygttgttygttgaattttattttttyggttaaaattaagttttttaataaagattttgaagtgttgagtttattaattta

SEQ ID NO: 14732 - DNA, 228 bp, Artificial Sequence
  Description of Artificial Sequence: Synthetic polynucleotide
gttattttgtagtttgattttagattgttgtgttagtaatyggygagatttygtgggygtaggatttttygagttaggtgygggatatagttttttgatgygtyggtttttaagttygtaggaaaagygtagtattygggtgggagaggtttgattttttaygtgttgtttgttatttttttttttgattaggaaagggaattttttgattttttgtgtttttygagt

SEQ ID NO: 14733 - DNA, 217 bp, Artificial Sequence
  Description of Artificial Sequence: Synthetic polynucleotide
ygtaggatgtagattgtagaygtttatygtttygtaggtagttttagttygagtggtggtygtgttgggtttgtgttyggggttttttttygtatgttttygttttttagtgtttgygatgaygtgygatttattaattattyggatttagygtatttttatgttaaatagygygtgtttatttgtaaagtataygatagtttttgyggttattggg

SEQ ID NO: 14734 - DNA, 201 bp, Artificial Sequence
  Description of Artificial Sequence: Synthetic polynucleotide
ttatttttgaagttattgagattataagtttattggaaggaattaatttyggatatattttgggtgttygtttgggatattgttatayggtgagtattatyggattygtttgggatattgttatayggtgagtattttyggatttgttttattttttattttgttttatttttttttagaatttaggggttaaatatygga

SEQ ID NO: 14735 - DNA, 204 bp, Artificial Sequence
  Description of Artificial Sequence: Synthetic polynucleotide
aagataataaattggttttaaataaaaagtaagaaaaatgttggggaggagttaagatggttaaataggaatagtttyggtttatagtttttagygtgagygaygyggaaaatgggtgatttttgtatttttatyggaggtatygggtttattttattagggagtgttagatagtgggtataggttagtgggtgtgygtatygt

SEQ ID NO: 14736 - DNA, 223 bp, Artificial Sequence
  Description of Artificial Sequence: Synthetic polynucleotide
tagtgggtatatagaggtagtygggattygtttggaagagttttygttyggggtaaggagtygggattgtgtttaggaggtagtggggagtttyggagagygaagygttttttgygtagattygygtgtttggagtatyggagtttgtagggtaagagagggtttttagaagatttaygaygttttattgggatgtagagggaaayggttatttgtattttta

SEQ ID NO: 14737 - DNA, 201 bp, Artificial Sequence
  Description of Artificial Sequence: Synthetic polynucleotide
tttaaagtattaggattataagtagaattatygygttttttgtttttttttttgtttttgtttttgttttgttgttgttgttgatgttgttatagagtttygtttttgtygtttaggttgggatgtaatggtgtgatttyggtttattgtagttttygtttttyggttttaagtaatttttttgttttagttttgtgagta

SEQ ID NO: 14738 - DNA, 203 bp, Artificial Sequence
  Description of Artificial Sequence: Synthetic polynucleotide
agtataaataaattggtygggyggtagttttagttattygggaggttgaggtagtagaatagygtgaattygggaggyggagtttgtagtgagtygagatygygttattgtattttagtttgggtgatagagtgagattaygttttaaataaaaaaaaaaaaaaaaaaaaaaagtatttttttagatttagtttgatattagg

SEQ ID NO: 14739 - DNA, 201 bp, Artificial Sequence
  Description of Artificial Sequence: Synthetic polynucleotide
ttaygttyggttaatttttttgtattattagtagagaygaggttttatygaggttttatygtgttagtygggatggtttgggttttttgatttygtgattygtttaattyggttttttaaattgttgggattataggtatgagatatygygttyggttgttgtttgattttttttagtagtgttttgtagttttttttgta

SEQ ID NO: 14740 - DNA, 201 bp, Artificial Sequence
  Description of Artificial Sequence: Synthetic polynucleotide
ttttygagtagttgggattataggtgtttgttatttygttyggttaattttttgtatttttagtagagatggggttttatygtgttagttaggatggtttygattttttgatttygtgattygttagtttyggttttttaaagtgttgggattataggygtgagttatygygttyggtttaatttaatttttaataatggt

SEQ ID NO: 14741 - DNA, 201 bp, Artificial Sequence
  Description of Artificial Sequence: Synthetic polynucleotide
aaaagttatagggggygtgaggatagayggygtgtttttttttatatatatggagaygtaggtyggagtaayggtatayggattaygtataygyggyggaygtattaaygtttaygtagaagagaataaaagtygtttttaattgggtataaattttttgtatttaaatatttygatatttataaataaaattagaataga

SEQ ID NO: 14742 - DNA, 201 bp, Artificial Sequence
  Description of Artificial Sequence: Synthetic polynucleotide
tgatttgtttttttyggttttttaaagtgttgggattataggygtgagttatygygttyggtttaggttattttttttttttttttttttttttttgaggyggagtttygttttgtygtttaggttggagtgtagtggygygatttyggtttattgtaagtttygtttttygggtttatatgatttttttgttttagtttt

SEQ ID NO: 14743 - DNA, 201 bp, Artificial Sequence
  Description of Artificial Sequence: Synthetic polynucleotide
ggattataggygtgagttatygygttyggtttaaattatggattttttttttttagtggagtttygtttttgtttaggttggaataggatggtaygaattyggtttattgtaatttttatttttygggtttaagygatttttttgttttagtttttygagtagttgggattataggtatgtgttattatgtttggttagta

SEQ ID NO: 14744 - DNA, 201 bp, Artificial Sequence
  Description of Artificial Sequence: Synthetic polynucleotide
aattttttttttatttttttygtttttttattttataaaatygttattgttattatggtttatttttaatgagttgttgggtatattttttagayggggtygtggtygggtagaggggttttttattttttagtaggggyggtygggtagaagygttttttatttttyggatggggyggttggtygggyggggggttgatt

SEQ ID NO: 14745 - DNA, 201 bp, Artificial Sequence
  Description of Artificial Sequence: Synthetic polynucleotide
gggggttttttaagtttagttttgggttygggtyggggtatagggtagagygggtttttttagtttttgttatgaggttaaggtagtgtatygttygtagygtatatttagaaattaaagtttaggagttggttattatttyggtttatagttgatggaagagtaggtgttttygagaatttatagtgttttttggttagt

SEQ ID NO: 14746 - DNA, 201 bp, Artificial Sequence
  Description of Artificial Sequence: Synthetic polynucleotide
tgggtagtagagtgagattttgttttaaaaaaaaaaaaaaaaagggggggtygggtgyggtggtttaygtttgtaattttagtattttgggagatygaggygggtagattaygaggttaggagatygggattattttagttaaaayggtgaaatttygtttttattaaaaatataaaaaattagtygggygtagtggyggg

SEQ ID NO: 14747 - DNA, 201 bp, Artificial Sequence
  Description of Artificial Sequence: Synthetic polynucleotide
gtgggagttatagggttttaggggaggagygttttaggtygyggtaatagtaggtgtaaaggttttgaggtaggayggggtagggaggtttagagtttatygygtagagattygggaggtyggtaggtayggtgaggattttgatttaaatttaggaaaggggaattatattggggtatgattttttgtatttttygagat

SEQ ID NO: 14748 - DNA, 201 bp, Artificial Sequence
  Description of Artificial Sequence: Synthetic polynucleotide
gggatttttttatgttggttaggttggtttygaatttttgattttaagtgatttatttgtttyggttttttaaagtgatgggattataggtatgagttatygygttyggttaagggtttttttagatgtaattaagttaagatgaggttatattgagttaggtgggttttaaatttaatggttagtgtttttataagtata

SEQ ID NO: 14749 - DNA, 211 bp, Artificial Sequence
  Description of Artificial Sequence: Synthetic polynucleotide
gttttagggtyggaggagtaggagatttgggtagyggggtgggygagtgtygggaggaggtaagaggtygygggggaggaagaygtttttttyggttttgyggggtaggtygygtagggtaggtygtgyggggtaggtggggggtgttaaggaagttygggygtggttatatygtagagaaagttatgggaggtaygttttgagagttggg

SEQ ID NO: 14750 - DNA, 201 bp, Artificial Sequence
  Description of Artificial Sequence: Synthetic polynucleotide
gtagttaaagttatttttttggttgaaagatatttttttyggggggaggagttaagatggtygagtaggaatagtttyggtttatagtttttagygtgagygataaagaagaygggtgatttttgtatttgtatttgaggtattyggtttattttattagggagtgttagatagtgggygtaggttagtgggtgygygtat

SEQ ID NO: 14751 - DNA, 201 bp, Artificial Sequence
  Description of Artificial Sequence: Synthetic polynucleotide
gtttaggatttgtagtttattatgtttgagttttttatttattttatgggtttttgtgtygtttaagtttttyggaygagtgttattttttgttttayggygtttagttttatygattatttaagggttgaggaatgtgagtatayggygtaggattggtaggtagttttatttgtagtttyggtgtgggatttattaggt

SEQ ID NO: 14752 - DNA, 201 bp, Artificial Sequence
  Description of Artificial Sequence: Synthetic polynucleotide
tggtaatattgtgaagaygtaggttttttatgggaaagattgttgttyggaagtttttatataataggtttttattgagattttaaggttgatagtayggygggagtttttgggatttttgggttyggtatagygttatygtagtaggtaggtatygggtggttagaagtygattatttttttaaatggtttgtatatatt

SEQ ID NO: 14753 - DNA, 201 bp, Artificial Sequence
  Description of Artificial Sequence: Synthetic polynucleotide
tttttatgggttgatttggtgattttttatggagaatgygtaggagtyggatattggtattgttaggtggaaaagttttttgttagggtgaaaagttagayggygtttgtttttygtttttggagtgtttttggtttaaygtagtagtttygtagataaaygttatagaaggtagagygttttatagatatgaaggagtgg

SEQ ID NO: 14754 - DNA, 201 bp, Artificial Sequence
  Description of Artificial Sequence: Synthetic polynucleotide
gatttttggattygttgggttgttttygtattyggttttttttttttaagtttgyggtygggtgtggtttttttaattttagygtygattttygtgtttgygygttttttttttattttttttattygyggggttaggggttatayggtatygtygtttgggttttygagtagggagagtygagtgttgattttgttagaa

SEQ ID NO: 14755 - DNA, 201 bp, Artificial Sequence
  Description of Artificial Sequence: Synthetic polynucleotide
ggatattttataaaatttttgaygagttttttttaaaattattaggttggtygggtgyggtggtttatgtttgtaattttagtattttgggaggtygaggygggtagattataaggttaggagatygagattattttggttaatayggtgaaatttygtttttattaaataatataaaaaattagttgggygtggtagygg

SEQ ID NO: 14756 - DNA, 201 bp, Artificial Sequence
  Description of Artificial Sequence: Synthetic polynucleotide
tttttttttatttttttaggggtttgattttttttttaatygtatttttatagaatggtyggttagataggaagtttyggttggygaagtttagttttygygggtataggttggygaattttagagattygggattygggtaggtttygtattygattttttatayggtttygatggagtagtagtagaygtttattyggt

SEQ ID NO: 14757 - DNA, 201 bp, Artificial Sequence
  Description of Artificial Sequence: Synthetic polynucleotide
aaattagttaggtttggtggtaggtatttgtaattttagttattttaggggttgaggtaggagaattgtttgaattygggaggtggaggttgtagtgagtygagattgygtttttgtattttagtttgggggataagagtgagatttygttttaaaaaaaaaaaaaaaaaaaaaaaaaggtygggtggtttatatttgtaa

SEQ ID NO: 14758 - DNA, 201 bp, Artificial Sequence
  Description of Artificial Sequence: Synthetic polynucleotide
tatygttatgatttgygagygygtgttttttatttygttagagttggtagtgtgygttatttattyggtgttyggttattatygttttaygtggayggygyggttggtttttaygtaygygttttyggtggtygaggtygaygtggaygtgttgttgtttatttttatgtttttgygtttttatttgttgggtygggtgat

SEQ ID NO: 14759 - DNA, 201 bp, Artificial Sequence
  Description of Artificial Sequence: Synthetic polynucleotide
ttygyggggttygttygtttttttagtygttgtttttygggyggygttygtyggygtygatttttataatttattttttttagatagagtttttttttgtygtttaggttggagggaagtggtatgattttagtttattgaaatttatttttttygggtttaagygatttttatttttgtttttggagtagttgggattat

SEQ ID NO: 14760 - DNA, 201 bp, Artificial Sequence
  Description of Artificial Sequence: Synthetic polynucleotide
ttattttagttttttgagtagttgggattataggtttgtgttattatgtttagtttattttttattttattttatttttatttttattttttttttgagayggagtttygttttgtygtttaggttggagtgtagtggygggatttyggtttattgtaagtttygtttttygggtttaygttatttttttgttttagtttt

SEQ ID NO: 14761 - DNA, 201 bp, Artificial Sequence
  Description of Artificial Sequence: Synthetic polynucleotide
aaatggtgatttagaggtygtttttattygaygggtttttttagtygaagaygtttagttaatgaattttaagtagatttatggtygggtgtgaagttaayggagtttttatttygtggagaygagtagtataaatttttgtttttaatgtttaatgatatgtaaaatatttaaatttgtaaygtagaattattaagttgt

SEQ ID NO: 14762 - DNA, 201 bp, Artificial Sequence
  Description of Artificial Sequence: Synthetic polynucleotide
ggtaggyggattattttagtttaggagttygagattagtttgggtaatatggtaaaattttatttttataaaaaatataaaaattagtyggttatggtgtygtgtatttgtagttttagttattagggagattgaggtgggagggttatttaagtttgggagaggygggtgtggtggaggttgtagtgagttaagatgtat

SEQ ID NO: 14763 - DNA, 201 bp, Artificial Sequence
  Description of Artificial Sequence: Synthetic polynucleotide
tagattgatagattttttttttttttgagatggagttttgtattgttattygggttggagtgtagtggtgtaatttyggtttatygtaatttttttaattygygtttaagtaatttttttgttttagtttttygagtagttgggattatagggygtgttattaygtttggttaattttttgtatttttagtagagatgggg

SEQ ID NO: 14764 - DNA, 201 bp, Artificial Sequence
  Description of Artificial Sequence: Synthetic polynucleotide
tttygggyggtaaggattttayggtgttggtataygtgttgygtaygttggtatygggtttgggtattttattgtagtttatggttgtagataagggtatygggygtggtttagygggaggattttagtaaggagttggggaaataygtatgtgtttatttagggtyggagtttattgaaggtttatgtgggtagtaygtg

SEQ ID NO: 14765 - DNA, 201 bp, Artificial Sequence
  Description of Artificial Sequence: Synthetic polynucleotide
yggtttattgtaatttttatttttygggtttaagygatttttttgttttagttttttgagtagttaggattataggtatgtattattattttyggttaatygttgaatttttagtagagayggggttttattaygttygtaaggttggtttygaatttttgattttaggtgatgtttttaygtyggttttttaaagtgtta

SEQ ID NO: 14766 - DNA, 201 bp, Artificial Sequence
  Description of Artificial Sequence: Synthetic polynucleotide
yggttttttaaagtgttgagattataggygtgagttatygygttyggtttattttaggtgatttattttttttagttttttaaagtgttgagattataggygtgagttattaygtygggtttattttaggtgatttatttttttyggttttttaaagtgttgagattataggygtgagttatygygttyggtttattttag

SEQ ID NO: 14767 - DNA, 201 bp, Artificial Sequence
  Description of Artificial Sequence: Synthetic polynucleotide
gatttgagaatygtttgtattagtttggttttttgtatagtgtttgygtyggtgtatattttagaggggagttgygttattagatgaattaggattttggyggaggaagggggtgtyggtagggtttttatggtatttgttgtttgtggttgaggggagtttggaagggtattagttttatttatttttggtygagatttt

SEQ ID NO: 14768 - DNA, 201 bp, Artificial Sequence
  Description of Artificial Sequence: Synthetic polynucleotide
ttyggtatatttagagtatattggggttggggtagatggtggtatttgttttggttggaggagttgggagggttggggaagggaygtgtgatttttttttygataaatttggaygagatgttaagtataatatagaggttggyggyggggtttttttttgttttyggtggattaatttattgtgggattttgggtaatttt

SEQ ID NO: 14769 - DNA, 201 bp, Artificial Sequence
  Description of Artificial Sequence: Synthetic polynucleotide
ttaaaaaatatatayggtygggygyggtggtttaygtttgtaattttagtattttgggaggtygaggtgggyggattaygaggttaggagatygagattayggtgaaatttygtttttattaaaaaaatataaaaaattagtygggygtagtggygggygtttgtagttttagttgttygggaggttgaggtaggagaatg

SEQ ID NO: 14770 - DNA, 201 bp, Artificial Sequence
  Description of Artificial Sequence: Synthetic polynucleotide
ayggttatatggtagggtttttgttgtttttatygtygttagtttagtygttygttattttttttagtggtgtttttgttattaatgggttttttataatygattyggtttaygggttgtagatgttgyggattattggygtggggaagtatgagtttatygattyggggtattttagaggtaagttttgttgttaygtgt

SEQ ID NO: 14771 - DNA, 279 bp, Artificial Sequence
  Description of Artificial Sequence: Synthetic polynucleotide
gggtttgggttygttaggtgtagaataaggagaaaggggtagaggggaagagtygggtygaattttagygagggattyggttttttttggaggagaggatygtattygygttaggagtatggatttatttagggagtgtttgggyggagaagtagtttttgttttaggtttttygttgyggtatttaaagaggtygggyggtttagaggttygtaagttaygtttttttttaggtttygttttygtttggttattttttttgttgttagtttttttatt

SEQ ID NO: 14772 - DNA, 201 bp, Artificial Sequence
  Description of Artificial Sequence: Synthetic polynucleotide
ttggttgttatgaaattataaattatgtttatagaaattttagtttgagaaagaatttagatttttttttttttttttttttttttttgagattgagtttygttttgtygtttaggttggagtgtagtgatgttatttyggtttattgygagttttgtttttygggtttaygttattttttggttttagtttttygtgtag

SEQ ID NO: 14773 - DNA, 201 bp, Artificial Sequence
  Description of Artificial Sequence: Synthetic polynucleotide
tygggggyggggyggggyggggyggggyggggygggggggtggggttgaggtaggagaatggygtgaattygggaggyggagtttgtagttagtygagatygtgttattgtattttaattygggygatagygattttattttaaaaaataataataataaaaaagaataaagattttataggtattttttttatagtagag

SEQ ID NO: 14774 - DNA, 201 bp, Artificial Sequence
  Description of Artificial Sequence: Synthetic polynucleotide
ggggttttatygtgttagttaggatggtttyggttttttgatgtygtgatttttttatttaggttttttaaagtgttgggattataggygtgagttatygygttyggtttagttttttatttttaataagtttttaggtgatgtttatgttggtagttttttgagattattatattttaagttttagggtgttagaaaaac

SEQ ID NO: 14775 - DNA, 201 bp, Artificial Sequence
  Description of Artificial Sequence: Synthetic polynucleotide
tgttgttgttgtttttaagttggagttttgttttgttatttaggttgtagtgtagtggtaygatttyggtttattataatttyggtttttygggttttagygatttttttgttttagttatttaagtagttgggtttataggygtatgttattaygtttggttaatttttgtatttttaggagagataggtttttattatg

SEQ ID NO: 14776 - DNA, 201 bp, Artificial Sequence
  Description of Artificial Sequence: Synthetic polynucleotide
aatygagttgtggaatggggtttygtggagtaggttgagtgtgtyggtygtggaygggtygtgggygggattttttagtgtgttattattgaggtattttygtttttttaygtgtttttgtttttttttttagaagtttaatattttygagaggatttaaaatatagagtgattagtttttatgtgtattttttggataaa

SEQ ID NO: 14777 - DNA, 201 bp, Artificial Sequence
  Description of Artificial Sequence: Synthetic polynucleotide
aggggagaygaagaaggagggggtagttygtttaggaggttaggggggtattygtgttyggtttaggtttatygaygtagatattattgatatttaygttygygttgtgttttttgyggygtttgyggtygttaatgttatttattgggyggtataygttatgtgagtataggatttaggttattttygtttgttttggyg

SEQ ID NO: 14778 - DNA, 201 bp, Artificial Sequence
  Description of Artificial Sequence: Synthetic polynucleotide
ttatatattttaygygttttgtttattaygaggtttgtattttttgggtagtaggtgtygygygttttygggtattttgtaggtggagtygtyggygtagygtagtatttygtgtttttgaygtyggtttyggatttagtygtygtygtatttgttatygtttttgggggatataygtayggagtttatttttaatagggg

SEQ ID NO: 14779 - DNA, 201 bp, Artificial Sequence
  Description of Artificial Sequence: Synthetic polynucleotide
tttattataaatataaaaaattagtygggygtggtggygggtatttgtagttttagttattyggaaggttgaggtaggaaaatgatgtgaattygggaggyggagtttgtagtgagtygagatygygttgttgtatttaagtttgggygatagagygagatttygggttaaaaaaaataaaagaatatagggtatggtatt

SEQ ID NO: 14780 - DNA, 201 bp, Artificial Sequence
  Description of Artificial Sequence: Synthetic polynucleotide
tagagtagttgggattataggygtttattgttaygttyggtttatttttttttgtatttttagtagagayggggttttatygtgttagttaggatggtttygattttttgaygtgatttattygtttyggttttttaaagtgttgggattataggygtgagttatygtgttyggtttatttatgtgttttttgggaagggg

SEQ ID NO: 14781 - DNA, 201 bp, Artificial Sequence
  Description of Artificial Sequence: Synthetic polynucleotide
aggygttygttattaygttyggttaattttttgtatttttagtagagayggggttttattatgttagttaggatggtttygattttttgattttgtgattygtttatttygtttttttaaagtgttgggattataggygtgagttatygtgttyggttgtttttyggtatattttttatttttagtatgtggtttttatat

SEQ ID NO: 14782 - DNA, 203 bp, Artificial Sequence
  Description of Artificial Sequence: Synthetic polynucleotide
gttggttatggaaggttatagtttygtagatggtgtyggtggagtttggggtagggtattttgagtttgggaaggtttggggtgaaggttyggaggttggygygtaggaggttaaagtagtagggaggtttggggagagttaggtggggttgtgttttttaygttgtaggtygtgtttatagatggtgaaagaygttgtggaa

SEQ ID NO: 14783 - DNA, 201 bp, Artificial Sequence
  Description of Artificial Sequence: Synthetic polynucleotide
ttttaagtagttgggattataggygtttattattaygttyggttaatgtttttgtttttttagtagagayggggttttatygtgttagttaggatggtttygattttttgatttygtgattttttygtttyggttttttaaagtgttgggattatagtaattattygatggygtgagttatygygttyggttatgtatgat

SEQ ID NO: 14784 - DNA, 201 bp, Artificial Sequence
  Description of Artificial Sequence: Synthetic polynucleotide
tttatttttgtgaaaatttttgtgtttgaaaattattgtaaaatatttggaattattattattatttatttttattttttgagayggagtttygttttgtygtttaggttggagtgtagtggygygatttyggtttattgtaagtttygtttttygggtttaygttatttttttgttttagtttttygagtagttgggatt

SEQ ID NO: 14785 - DNA, 201 bp, Artificial Sequence
  Description of Artificial Sequence: Synthetic polynucleotide
ttggygagagataaggtatttagggaaagaagaaaaaagtttaggaagggattttagtttgttagattyggggtagaagtttttttyggaygagtttttayggagaaatttaaatattaggggtttyggaaggtyggaagtttttaagttgtttaggaaaagattaaagagatataaattataaaagttttgggattttta

SEQ ID NO: 14786 - DNA, 201 bp, Artificial Sequence
  Description of Artificial Sequence: Synthetic polynucleotide
gttattgattttgagttttygtttttttatttataaaattgagattagggtygggtatggtggtttatttttgtaattttaatattttgggaggtygaggygggyggattaygaggtgaggagtttgagattagtttgattaatatggtgaaatttygtttttattaaaaatataaaaattagtygggygtggtggygygt

SEQ ID NO: 14787 - DNA, 201 bp, Artificial Sequence
  Description of Artificial Sequence: Synthetic polynucleotide
gtatgtttattgtagaattatttataatagtaaagatatggatagatyggattaagaaaatgtggtgtatatatatatatgttatggaatattatgtagtygtaaaaagaataaaattyggttttttgtagtaatatggatgtagttggaggttattattyggagtgaattaatataggaatagaaaattaaatattgttt

SEQ ID NO: 14788 - DNA, 201 bp, Artificial Sequence
  Description of Artificial Sequence: Synthetic polynucleotide
ttttagtttygtgatyggttttttgttttgtgttgatatttagtatttttttyggtttttgtttygaggggaaaataaaataggggtttttaggttttatygttggtttattttatygtagtaaatygatygagggttttttgttgygtttttgyggtttgttgttttatttagyggttttgatattyggtatttatttaa

SEQ ID NO: 14789 - DNA, 201 bp, Artificial Sequence
  Description of Artificial Sequence: Synthetic polynucleotide
gygggyggattaygaggttagtagattgagattattttggttaatatggtgaaatttagtttttattaaaaatataaaaaattagtygggtgtggtggtaygygattgtagttttatttattggggaggttgaggtaggagaatygtttgaattygggaggyggaagttgtagtgagtygagatygygttattgtattttc

SEQ ID NO: 14790 - DNA, 201 bp, Artificial Sequence
  Description of Artificial Sequence: Synthetic polynucleotide
ttttattttttagttagttttttgtgtagtgtttagggtttyggtagttaggatagagygagtaaaagaagatggatagtggatagggygtagtggtttaygtttgtaattttagygttttgggagagygaggygggtagattataaggttaagagattaagattattttggttaatatggtgaaattttgtttttattaa

SEQ ID NO: 14791 - DNA, 201 bp, Artificial Sequence
  Description of Artificial Sequence: Synthetic polynucleotide
aaggtaggyggattayggggttaggagttygagattagtttggttaatttggtgaaaattygtttttattaaagatataaaaattagttgagtgttgtggygtaygtttgtaattttagttattggggaggttgaggtaagagaattatttgtaatygggaggyggaggatgtagttagygagatggygttattgtatttt

SEQ ID NO: 14792 - DNA, 201 bp, Artificial Sequence
  Description of Artificial Sequence: Synthetic polynucleotide
atttagggggttgaggtaggagaatygtttgaattygggaggyggagtttgtagtgagtygagattgagttattgtatattttagtttgggtaataagagygagatttagttttagaaaaaataaataaataataaaataaaaagtaggtygggtgygatggtttatatttataatattagtattttgggaggtygaggtg

SEQ ID NO: 14793 - DNA, 3238 bp, Artificial Sequence
  Description of Artificial Sequence: Synthetic polynucleotide
tagaaygttaggygtgaaaggtgaygttgaggtagtaygagggaaaaagtagtaggtagygatygttatayggaygatagtgttttttyggtagtttttgygttagattyggggttgtygtggagtttttgatttgaatttagggtgygtgtygygtttayggggggatattttaaagyggtaagaatgttttttgggaagggaataggaygttaggtttgaaaggggattttgaagtagtttaggaaaaaattttttayggattayggtgttttttyggtagtttttttgttaggttygagggggttgttgtgttttaggtttgtatttagggttttayggggggtattttaaagyggtaagtaggtttttaggggaaggggatagtaygttaggtttggagggggaygttgaggtagtttygggaataaagaggggatgttggggttttgttayggataatattgttttttygatagtatttgtggtgggtttgggagygttatggagtttttggtttgtatttaaggtgygtgtttygttttyggggggtattataaagyggtaagaaggttatygggggaagggtatgggaygttagggttgaaagggatagttgaggtagttyggggaaaaaygtggtaggttggggtygttttatggaygatagtgtttttttagtagtttttgygttaggttyggggtggtygtggagtttttggtttgtatygagggtgygggtygtatttatgggggtattttaaagtggtaagaaggtygtygggygaaygttatagaaggttaggttttaatggggatgttgaggtagtatagagagaaaagyggttagtygggttttttttayggatgatagtgtttttttggtagtttttgygttgggttyggggggatygtggagtttttattttgtatttagggtgygtgtttygtttatgggaggtattttaaagyggtaagtaggtttttgggggaaggggatagtattttagatttgaagggggattttgaggtagttygtggaaaaaaayggygaygttgagttttttttataaaygatagtgtttttttggtagttttttygttgggttagggtggttttggagttygtggtttgtatttagggtgygtgtttygtttaagggggtattttaaagyggtaagtagattttygggggaagggagagtaygttaggtttgaaggggaggttgaggyggtttyggggtaaaagtggtgaagttggggtttttttayggatgatatygtttttttggtagtttttgtagtgggtttagaggtgtygtggagtttttggtttgtttttaggttgtgtgtttygtttaygagtggtattataaagtagtaagaaggtttttaggggaagggtataggattttagggttgaaaggtagagttgaggtagatyggtgttattttaaggataatagtgttttgttyggtagtttttgtatygggtttggggtggttgtggagtttttggtttgtattyggggtgygtgtygtgtttaygatgggtatygtaatgyggtaagaagttttygagtggaagggaataggaygtygagtttgaaaggggaygttgaggtagttyggggaaaaaatttttattgagaatagtgttttttyggtagtttttgagtgggatttaggtggayggtggagtttttggtttggatttagggtgtttgttttgtttayggggtgtaygtgaaagtggtaatagggttttygggggaaggggataatatgttaggtttgaagagggaygttgggttagttagaggaaaatagyggttaggttgtggtygttttatagattatagtgttttttyggtagtttttgagtttggtttaggygggggggtttggagtttttgttttgtaatagagtgygtgtttygtttaagtgtgtaygygaaagttgtaagaagggtttygggggaagggaataggatgttaggtttgaaaggggattttgaggtagtttagggaaaaattttttayggaggatagtgatttttygatattttttgygtttggttttgggggttttggagtttttggtttatatttagggtgygtgtttygtttaygggtggtattttaaagtagtaagaaagtttyggggggggaagaataggatgttagatttgaaaggggaygttgaggtagtttaggaaaaaaaggggygaggttggggtttttttayggatgatagtgttttttttatagtttttatgttagtttygggagggtygyggagtttttgttttgtatataatgtgygtgtttygtttayggggggtattttaaagtggtaagaagtttttygygggaaggtaataggaygttaggtttgaatggggaygtttaggtagtttggagaaaaaagtagygaggttggggtgattttaygaatgatagtgttttatyggtagtttttttgtygggtatgygggggttgttgattttttggtttgtatttagggtgagtgttttgtttayggygggtattataaagtagtaagaaggttttygggggaaagggatagtaygttagttttgaagggggaagttgaggtagtttyggggaaaaaaagyggggatgttggggtttttttayggaygatattgtttttttagtagtttttgtagtgggttygggagygttttggagtttttgttttgtatttygggtgygtgttttatttayggggagtattataaagyggtaagaaggttattgggggaagggtataggaygttagggttgaaggggatagtggagatagtttaaggaaaaaagtggygggatggtgtygttttaaggatggttatttttgygtygggttagggatggtygyggagtttttggtttgtatttaggttgtgtgtttygtttatagggggtattttaaagtagtaygaaggtttttaggggaagggaagaggaygttaggtttggaaggtgaygttgaggtagtagggggtaaaaagtggygggtygggtttttttayggatgatagtgttttttyggaagtygttgygtagggttyggygtgtttgtggagtttttggtttgtatttagaatygtgyggygtttaygaygggtattttaaagyggtaagatatttttygttggaagggaataggatgttaggtttgaaaggagaagttgagttagttyggggaaaaa

SEQ ID NO: 14794 - DNA, 201 bp, Artificial Sequence
  Description of Artificial Sequence: Synthetic polynucleotide
ttaaggttattattttaaagtgttttagaaaataatatatagaaggtygggygyggtggtttaygtttgtaattttagtattttgggaggtygaggggggyggattaygaggttaggagatygagattattttggttaatayggtgaaatttygtttttattaaaaatatatatatataaaattagtygggygaggtggta

SEQ ID NO: 14795 - DNA, 201 bp, Artificial Sequence
  Description of Artificial Sequence: Synthetic polynucleotide
ttattatttatttattattttgtttgtaatttgggttattatttattagtaatttgatgattaataygttttattttagtaggtgtgtaaggtgygggggyggatataaagattgyggttttyggagaggayggttagggggtygtttttgtaagtgttttttaaaataattggttatygttttygagtgtttgggygtyg

SEQ ID NO: 14796 - DNA, 201 bp, Artificial Sequence
  Description of Artificial Sequence: Synthetic polynucleotide
ayggtgattagaaatgtattaaattttgaatgtataaaagagagagttttaatatgaaatagtaattttttgagaaygaagatttygtagtgtyggtgttygttgggtygtgtaggtttyggtygttttaygttygtgttygtttttatygtgattttttygttttyggtaygtttagggttaattttygggtttattgta

SEQ ID NO: 14797 - DNA, 201 bp, Artificial Sequence
  Description of Artificial Sequence: Synthetic polynucleotide
tttggggattattttgtttttttgttttgattttttttttttttttttttttttttttgagayggagtttygttttgtygtttaggttggagtgtagtggygygatttyggtttattgtaagttttatttttygggtttatattatttttttgttttagtttttygagtagttgggattataagtattygttattaygttc

SEQ ID NO: 14798 - DNA, 201 bp, Artificial Sequence
  Description of Artificial Sequence: Synthetic polynucleotide
ttttygggayggggggatttttaggtattttygggttttgagttgggtygttagggtygttygttttttgtygttttttttgggtygagtttygttttygygttttgtagtggagtagtygtttttaaaggtgtaygtgattagggtgyggtygggatagygggtattttttygggttttagygtygygtgygttttggtc

SEQ ID NO: 14799 - DNA, 201 bp, Artificial Sequence
  Description of Artificial Sequence: Synthetic polynucleotide
yggygttyggtatgaaattttttttttttttttgagatagagtttygtttttgygtttaatttggagtgaagtggtaygattttggtttatggtaattttygtttygtaggattaagttattattttgatttagtttttygagtagttgggattataggtatttattattatggtyggttaatttttgttttttgtttttt

SEQ ID NO: 14800 - DNA, 201 bp, Artificial Sequence
  Description of Artificial Sequence: Synthetic polynucleotide
aagtagttttttaaaattttaaaaagtaagtatagttttaggaaggagggaggttagtgaaattaaatttttgtygataagtttaaagtaattggtaagaygttgggaaattagatattgaaatattygtttttaatttttaatttgttattatttgaaataaagttattagggatagtygggygyggtggtttaygtttg

SEQ ID NO: 14801 - DNA, 201 bp, Artificial Sequence
  Description of Artificial Sequence: Synthetic polynucleotide
atttattgaagaagttgaagtgtgaagtgtgaaattgaagaattttgaaatgtattgagtagtgaaaagattatgtatataaaaataggttggtygggtgyggaggtaggtagattatttgaggttaggaggygygatttyggtttattgtaagttttatttttygygtttaygttatttttttgttttagttttyggagt

SEQ ID NO: 14802 - DNA, 201 bp, Artificial Sequence
  Description of Artificial Sequence: Synthetic polynucleotide
attttgggaggttaaggtaggyggttgggaggtgtaggttgtagtgagtygagattaygttattgtattttagtttgggtattattgagtattgagtgaaygagatttygtttgtaatttyggtatttygggaggtygaggttggyggattattygyggttaggggttggagatyggttyggttaatatagygaaattttg

SEQ ID NO: 14803 - DNA, 201 bp, Artificial Sequence
  Description of Artificial Sequence: Synthetic polynucleotide
gtggygtaatttyggtttattgtaagtttygttttttaggtttatgttatttttttgttttagttttttgagtagttggtattataggygtygattattaygttyggttaattttttgtattttttgatagagayggggttttatygtgttatttaggatggtttygatattttgattttgtgattygtttgtttyggttt

SEQ ID NO: 14804 - DNA, 201 bp, Artificial Sequence
  Description of Artificial Sequence: Synthetic polynucleotide
gagtgtagtggtgtgattttggtttattgtaagttttgttttttgggattatgttatttttttgttttagttttttgagtggttgggatttataggtgtttgttaatatgtttggttaattttttgtatttttagtagagatggggttttattgtgttagttaggatggttttgatattttgattttgtgatttgtttatt

SEQ ID NO: 14805 - DNA, 208 bp, Artificial Sequence
  Description of Artificial Sequence: Synthetic polynucleotide
ttggttaatatgatgaaattttgtttttattaaaaatataaaaaattagttgggtgtggtggtgggtgtttgtagttttagttatttgggagattgaggttgaatggtgtgaatttgggaggtggagtttgtagtgagttgagattatattattgtattttagtttgggtgatagagtgagattttgttttaaaaataaataaataaa

SEQ ID NO: 14806 - DNA, 201 bp, Artificial Sequence
  Description of Artificial Sequence: Synthetic polynucleotide
atatggtgaaattttgtttttattaaagtataaaaaattagttgggtatagtggtataggtttttagttttagttatttgggaggttgaggtaggagaattgtttgaatttgggaggtggagggtgtagtgagttattgtatgttagtttgggtaatagagttagattttgttttaaaaaaaaaaaaaaaaaagaaagaaa

SEQ ID NO: 14807 - DNA, 201 bp, Artificial Sequence
  Description of Artificial Sequence: Synthetic polynucleotide
gttgaggtgggtgaattatttgaggttaggagtttaagattagtttggttaatatggtgaaattttatttttattaaaaatataaaaattaattgggtattgtggtgtgtgtttgtaattttagttatttgggagattgaggtaggagaattgtttgaattttgttggtagaggttgtaatgagttgagattgtattatgg

SEQ ID NO: 14808 - DNA, 201 bp, Artificial Sequence
  Description of Artificial Sequence: Synthetic polynucleotide
ttttggaggttatatttggataggagttggtttttaattttagttaagagtttatagaggggtttttgtttaattgtatggagtttatggttgataggtgtggtggtaggatgggatgggattggatgggttgtgtatttgtttttatattagtattatattgttttgattattttagtttgtaagatgtttgaaatttat

SEQ ID NO: 14809 - DNA, 201 bp, Artificial Sequence
  Description of Artificial Sequence: Synthetic polynucleotide
aaaattataataaagtttttgtttaattatagattttgatttattggttaggtaggttgtttggtttttgatttgtatttagagggtttttggattttggtgttgtgtgggttagtgttttgggagttggggattggtattggttgtgtttggttgttgagtgtgttttattaattattattttgtttttttaggttaatg

SEQ ID NO: 14810 - DNA, 201 bp, Artificial Sequence
  Description of Artificial Sequence: Synthetic polynucleotide
gaggttttttttatttaggtaaagaagaaagaaggatggttttaggagtttatataatatggttaaaggttgggtagtgtgtagtagaatgtaagatgagtggttaggttatagggtgagattatgaaggatttttttttggttttaaatgttttttaagagtgtttttttattatttttttttttattttttaagaatag

SEQ ID NO: 14811 - DNA, 201 bp, Artificial Sequence
  Description of Artificial Sequence: Synthetic polynucleotide
tttttaagtagttgggattataggtgtttgttattatgtttggttaatttttaatatttttagtagagatggggttttattgtgttagttaggatggttttgattttttgattttgtgatttgtttgttttggttttttaaagtgttgggattataggtttgagttattgtgtttggtttttagtttttatatttgttaaa

SEQ ID NO: 14812 - DNA, 201 bp, Artificial Sequence
  Description of Artificial Sequence: Synthetic polynucleotide
ttaatataaaaattagttgttttagttgggtgtggtggtttaagtttgtaattttagtattttgggaggttgaggtgggtggattatgaggttaggagattgagattattttggttaatatggtgaaattttgtttttattaaaaatatataaaaaatgagttgggtgtggtggtaggtgtttgtagttttagttatttag

SEQ ID NO: 14813 - DNA, 201 bp, Artificial Sequence
  Description of Artificial Sequence: Synthetic polynucleotide
taaattttgttgttgtttattttatgggtttatattgtttttatgagttgtaatatttattgtaaaggtttgtaggtttatttttgagttggtaagattatgaatttattagaagaaattttgaatatatttgaatattagaaggaataaattttggatatgttatttttaagaattgtaatatttattgtaagggtttgt

SEQ ID NO: 14814 - DNA, 201 bp, Artificial Sequence
  Description of Artificial Sequence: Synthetic polynucleotide
ttttgttttagtttttttagtagttgggattataggtgtttgttattgtgtttggttaattttttgtatttttaatagaaatggggttttattgtggttttgattttttgattttgtgatttgttgtttattttggttttttaaagtgttgggattataggtgtgagttattgtgtttggtttttttttttatttttaata

SEQ ID NO: 14815 - DNA, 201 bp, Artificial Sequence
  Description of Artificial Sequence: Synthetic polynucleotide
ggggttttattgtgttagttaggatggttttgattttttgattttgtaatatgtttgttttggttttttaaaatgttgggattataggtgtgagttattgtgtttagttggttttataggtatttatgtatattaatagtttttttttgagatggagttttgttttatttttaggttggagtgtaatggtgttgttttgat

SEQ ID NO: 14816 - DNA, 235 bp, Artificial Sequence
  Description of Artificial Sequence: Synthetic polynucleotide
ttaattttttaggtgttgtttgttatttttttttttgattaggaaagggaattttttgattttttgtgtttttggagtgaggtaatgttttgttttgttttggtttatgtagggtgtgtgtatttattgatttgtgtttattgtttggtattttttagtgagatgaatttggtattttagatggaaatgtagaaattatttattttttgtgttgttttttttgggagttgtagat

SEQ ID NO: 14817 - DNA, 201 bp, Artificial Sequence
  Description of Artificial Sequence: Synthetic polynucleotide
ggtagataaagatatatgattagggttggttgtggtgatttatgtttgtaattttagtattttgggaggttaaggtgaatggattatgaagttaggagattgagattattttggttaatatggtgaaattttgtttttattaaaaatataaaaaattagttgagtgtggtggtgggtgtttgtagtgttagttatttgggg

SEQ ID NO: 14818 - DNA, 201 bp, Artificial Sequence
  Description of Artificial Sequence: Synthetic polynucleotide
taggtgatttttgtatttttatttgaggtattgggtttattttattagggagtgttagatagtgggtgtgggttagtgggtgtgtgtattatgtgtaagttgaagtagggtgaggtattgttttatttgggaagtgtaaggggatagggagttttttttttgagttaaaaaaaggggtgatagatgtatttggataattag

SEQ ID NO: 14819 - DNA, 201 bp, Artificial Sequence
  Description of Artificial Sequence: Synthetic polynucleotide
agagatagaagttgttggagggtgagaggaatgtattagtggaagaagatagaagtggttggttatggagagtatgttagtagaagaatatatttatagatgttggtttgtttgtgggttttttggtaggttattgattggtgggatgaggtggagtttgttttgggtagtaggaggatagtttgggtatttagtggttta

SEQ ID NO: 14820 - DNA, 201 bp, Artificial Sequence
  Description of Artificial Sequence: Synthetic polynucleotide
tttatagaggtaggtaggtttttttgagttgtggtgggttttatttagtttgagttttttggttgttttgtttatttaagtgagtttgggtaatggtgggtgttttttttttagttttgttgttgttttgtagtttgattttagattgttgtgttagtaattagtaagatttggtgggtataggattttttgagttaggtg

SEQ ID NO: 14821 - DNA, 201 bp, Artificial Sequence
  Description of Artificial Sequence: Synthetic polynucleotide
gtttttttttttagttaaagaaaggggtgatagaaggtatttggaaaattgggttatttttattagaatattgtgtttttttgatgggtttaaaaaatggtgtatttggagattatatttggtatttggtttagagggttttatgtttatagagttttgttgattgttagtatagtagtttaagattaaattgtaaggtgg

SEQ ID NO: 14822 - DNA, 201 bp, Artificial Sequence
  Description of Artificial Sequence: Synthetic polynucleotide
tgtttgttatttttttttttgatttggaaagggaattttttgattttttgtgttttttaggtgaggtaatgttttgttttgttttggtttgtgtatggtgtgtgtatttattggtttgtgtttattgtttggtatttttttagtgagatgaatttggtattttagatggaaatgtagaaattatttgttttttgtgttgtt

SEQ ID NO: 14823 - DNA, 201 bp, Artificial Sequence
  Description of Artificial Sequence: Synthetic polynucleotide
gtaagtaaggggtgtgttttagttttgtttgtgttagagtttttttatttttattatttggtaggtttagtgtttgggaataatgatgtatgtggataagtggagggtgagtaaggtgaagaggagttttattgagtaatagaatagtttagaggagatttgtggtgggtagtttttttttgtagttagggtgttttgatg

SEQ ID NO: 14824 - DNA, 201 bp, Artificial Sequence
  Description of Artificial Sequence: Synthetic polynucleotide
ggtagattatttgaggttaggagtttgagattagtttggttaatatggtgaaattttgtttttattaaaaatataaatattagttgggtgtggtggtggttgtttgtaattttagttatttgggaggttgaggtaggagaattgttggattttgggaggtagatgttgtagtgagttaagattatgttattgtattttagt

SEQ ID NO: 14825 - DNA, 201 bp, Artificial Sequence
  Description of Artificial Sequence: Synthetic polynucleotide
ttgtagtatatattattatttttttagtatattattattttttaatttggtttttattgttaataaagttgttggttgtaggaatgagagagtggtagaatgatatttttgttttattttttgggattttttagttgttggtggttttaagtttttaggagttatggtgttttttttttttagatgttagtgttaatagtg

SEQ ID NO: 14826 - DNA, 201 bp, Artificial Sequence
  Description of Artificial Sequence: Synthetic polynucleotide
ggttagaagatggtgagtggaaagtttgggtgtgtggagagattttaagaaggggttgtttagttgtgaattttgtatttgttgtttgtgttttatttggtggttttgaaattaggtttttatttggatttttgtgagttgtatatttttggttagttatttttgttttagagggtttagatattggtagtgttggaagac

SEQ ID NO: 14827 - DNA, 207 bp, Artificial Sequence
  Description of Artificial Sequence: Synthetic polynucleotide
gtttttgtgatttttgtagttagtgaattagtatatttttggggttgaagttatgtgttaggtatgttagtgttattagtttgtttagggttagtttttttgatggtggtggtagtaggtggattttgggttggaatgtgttttttggagggtagagagttaggttagggggttgggtaggggatgagagagtttttttgttttggt

SEQ ID NO: 14828 - DNA, 201 bp, Artificial Sequence
  Description of Artificial Sequence: Synthetic polynucleotide
tttatggggtagttagaagggagatggtttttttttggagttggggtgtttggtagttttggtttttttttgattgtttaggttaatttttgtttttttttgttggtttatggtttattggtttttgggtgtttgttagtgtgtttttttgttggggtgtttttatggatgattagtgtttgtgttttttttttttgatgt

SEQ ID NO: 14829 - DNA, 201 bp, Artificial Sequence
  Description of Artificial Sequence: Synthetic polynucleotide
gaagatgggtgatttttgtatttttatttgaggtattggttttattttattagggagtgttagatagtgggtgtaggttagtgggtgtgtgtattgtgtgtgaagtagggtgaggtattgttttatttgggaagtgtaaggggttagggagttttttttttgagttaaagaaaggggtgatggatgtatttggaaaattgg

SEQ ID NO: 14830 - DNA, 201 bp, Artificial Sequence
  Description of Artificial Sequence: Synthetic polynucleotide
ggggtgtggttttttggagggaattagtgtggagatgtttgtgtgtttggggtgtggttttttggagggagttagtgtggagatgtttgtgtgtttggggtgtggtttattagagggagttagtgtggagatgtttgtgtgtttggggtgtggttttttggagggaattagtgtggagatgttggtgtgtttggggtgtgg

SEQ ID NO: 14831 - DNA, 201 bp, Artificial Sequence
  Description of Artificial Sequence: Synthetic polynucleotide
gatgttttttattttttagatggggtggtggtggggtagagatattttttagtttttagatggggttgtggtttggtagaggtgttttttatattttagatgatgggtggttgggtagagatgttttttattttttagatgggatgatggttaggaagaggtgttttttattttttagattgggtggttgggtagaggggt

SEQ ID NO: 14832 - DNA, 201 bp, Artificial Sequence
  Description of Artificial Sequence: Synthetic polynucleotide
gagtatagtgttggtgggttggtattgttgggggatttggtgtattttttatagttgttgttttgggtggtaagttttttattgtttggggttggtggggtggttagttgtttggagtgtggggtttgttaaggttatgtttatttagaatttgttttggtttattgtgagtagttttagtttttgttttgtgtttttttt

SEQ ID NO: 14833 - DNA, 201 bp, Artificial Sequence
  Description of Artificial Sequence: Synthetic polynucleotide
tttttgagtagttggggttataggtgtttattattatgtttggttaattttttgtatttttagtagagatggggttttattgtgttagttaggatggttttgattttttgatgttgtgatttattgttttggttttttgaaatgttgggattataggtttgagttattgtatttggttatatttatttatttttaattaga

SEQ ID NO: 14834 - DNA, 201 bp, Artificial Sequence
  Description of Artificial Sequence: Synthetic polynucleotide
ttttttttttttttgattggttttgtttttattgttggttttgtttttattgttggtttgggttttatttatgttggagttgttttatttaaggagattgtgtagttggaaagttatatgtgtgagtttagaggtgggttttggttgtagatttgttatggtttttgaagtttttgtgtgtttaggggtgttttttggttg

SEQ ID NO: 14835 - DNA, 201 bp, Artificial Sequence
  Description of Artificial Sequence: Synthetic polynucleotide
gttagttagttattttgagatggagttttgttttgttgtttaggttgtagtgtagaattgtttttttggtttattgtaatttttattttttgggtttaagtgataattttgttttagttttttaagtagttggaattatagatgtgtattattatgtttaattaatttttgtatttttagtagagatggggttttgttata

SEQ ID NO: 14836 - DNA, 201 bp, Artificial Sequence
  Description of Artificial Sequence: Synthetic polynucleotide
gtggttttttttgatttagattgtttttaaatattgaatgttgaattgggttgggtgtggtggtttttatttgttattttagtattttgggaggttgaggtgggtggattatgaggttaggagattgagattattttggttaatatggtgaaattttgtttttattaaaaatataaaaaaaaaaaattagttgggtgtgat

SEQ ID NO: 14837 - DNA, 201 bp, Artificial Sequence
  Description of Artificial Sequence: Synthetic polynucleotide
ttatttttgttttttattttgggggttttatgattttggagtttttatgttttggtatagagtttgtttttttgggattgggttttggttgagtagatattgtttagttgttttttgattagtgttttttgttttgtgtttggttggtattggtggtttgttgagtttagtttggtattttgttggtattggtggtttgtt

SEQ ID NO: 14838 - DNA, 380 bp, Artificial Sequence
  Description of Artificial Sequence: Synthetic polynucleotide
ttttattaaaatataaaaaattggttgggggtggtggtatgtgtttgtagttttagttatatgggaggttgaagtaggggaattgtttgaatttgggaggtggagattgtagtgagttgagattgtgttattgtattttaatggtattttagtttgatgatagagtgagattttgttttaaaaataataataaataaataaataaataaataaaaattagttgggtgtggtggtgtgtgtttgtagttttagttatttgggagattgaggtaggagaattgtgggaatttgggaggtggaggttgtagtgagttgagattgtgttattgttttgtagtatggagatagagttagattttgtttaaaaaaaaaaaaaaaaa

SEQ ID NO: 14839 - DNA, 201 bp, Artificial Sequence
  Description of Artificial Sequence: Synthetic polynucleotide
aggtgggtggattatgaggttaggagattgagattattttggttaatatggtgaaattttgtttttattaaaaatataaaaaattagttgggtgtggtggtgggtatttttagttttagttatttgggaggttgaggtaggagaatggtgtgaatttgggaggtggagtttgtagtgagttgagattgtgttattgtattt

SEQ ID NO: 14840 - DNA, 201 bp, Artificial Sequence
  Description of Artificial Sequence: Synthetic polynucleotide
aaaaattagtttggtgtggtggtatgtgtttgtaattttaattatttgggaggttgtggtaggtgaattatttgaagttgggaggtgaaggttgtagtaatgttgttttttgtattggatgaagtgttttttattaaatttttttattggagagggtgggatttgtgggttttttgggtggtttgattttgatattttgtg

SEQ ID NO: 14841 - DNA, 201 bp, Artificial Sequence
  Description of Artificial Sequence: Synthetic polynucleotide
atggtgaattgtggtgattgtgatgtgtttttttattttttttttggtggattttttttatttgttttttttttaatttttaataagtttttattattgatgatgtgagatgatgatggtatgggattttttattttgttagggttaatgaattttatattatgagttgtatgaggtatgagggagtttttaagggaggaa

SEQ ID NO: 14842 - DNA, 201 bp, Artificial Sequence
  Description of Artificial Sequence: Synthetic polynucleotide
gatgtagaagatgggtgatttttgtatttttatttgaggtattgggtttattttattagggagtgttagatagtgggtataggttagtgggtgtgtatattgtgtgtgagttgaagtagggtgaggtattgttttatttgggaagtgtaaggggttagggagttttttttttgagttaaaggggtgatggatgtatttgga

SEQ ID NO: 14843 - DNA, 201 bp, Artificial Sequence
  Description of Artificial Sequence: Synthetic polynucleotide
taaataattagggataaagagtattatattgttgaatttattttatttttaattttttttttaaattttttataaaaaattagttgggtgtggtggtgggtgtttgtagttttagttatttagagattgaggtaggagaatggtgtgaatttgggaggaggagtttgtagtaagtggagattgtgttattgtattatagtt

SEQ ID NO: 14844 - DNA, 201 bp, Artificial Sequence
  Description of Artificial Sequence: Synthetic polynucleotide
atttttgtgatttatattttatttgtatattttttttttttttgaaaatttttaataaaaatttgttggttttatggtttaggggtattatagaatttattgatatgtgatgttttttttggatgtttggttttaaaattttttttttttgtattttgtttttttattttttaatttggttgatgtttagggaaaatagaa

SEQ ID NO: 14845 - DNA, 201 bp, Artificial Sequence
  Description of Artificial Sequence: Synthetic polynucleotide
ttttggtgaatttttattgttataattttaaaaatttggtttagggaggagtttattttttattttttatataggtgatatatgtagaaatataatttgttgttgtgtttgtgtggttaggattttttttttatatgtaatgatttagttgattagtttaagatatgtttggtttttatgtttgtttgtaggggtattgtt

SEQ ID NO: 14846 - DNA, 201 bp, Artificial Sequence
  Description of Artificial Sequence: Synthetic polynucleotide
ttgggagtagaggttttttggaaggtattatttttagagtgtgtttttgagtaattttgaggatgggttttgggttattattgtgtgttggaaatagtagtgtttaggttgttggaggaggttggtttttttggtaggttttggttgtgtttagagttttgtgggttttggagataaggttttggtttgaggtttttgggg

SEQ ID NO: 14847 - DNA, 201 bp, Artificial Sequence
  Description of Artificial Sequence: Synthetic polynucleotide
gtttgagtaggataaggattttagagtttaagagaattttgatgattagagaagggtttttgaggttattggggatgtatggtttgtattttggtttttgtgggataatggaggtttttttttttttttgtgtttgggtttgggtttttgtagatagatttttatatttagaggtgagaaattagatataattagatattt

SEQ ID NO: 14848 - DNA, 201 bp, Artificial Sequence
  Description of Artificial Sequence: Synthetic polynucleotide
ttatatgttaggttataaaataagtttttagaaatttaagaagattgaaattatattaattattttttaaaaaaaataggtggttgggtgtggtggtttatgtttgtaattttagtattttgggaggttgagatgggtggattatgaggttaggagattgagattattttggttaatatggtgaaattttgtttttattaa

SEQ ID NO: 14849 - DNA, 568 bp, Artificial Sequence
  Description of Artificial Sequence: Synthetic polynucleotide
ttagtatatagatataaaaatgagaggtgatagtgtgttggtagtttttatagtttttgtttttttttggtatttttttggttttggtgtttattttggttgtgtttgaggagttttttagtttgttgttgtattgtgggagtttttttttgggttggataaggttggagttggtttttttagtttgtgggtaggtgtggagagagaggtgtgggtgggaattgtggttgtaggttgtgtttgtgggttagtttgagttttgggtgggtgtgggtttggtaagttttgtatttggagtggttagttggtttgggtagtgaggagtttagtatttgggttagtagttgttgtgtttgattttttgttgggttttagttgtttttttgttgggtagggtttgggatttgtagttttttatgtttgagtttttatttttgttgtgtgtttttgtgtagtttaagtttttttgatgagtgttaatttttgttttatggtgtttagttttattgattgtttaagggttgaggagtgtgggtatatggtgttggattggtaggtagttttattt

SEQ ID NO: 14850 - DNA, 201 bp, Artificial Sequence
  Description of Artificial Sequence: Synthetic polynucleotide
tttattaaaaatataaaaaattagttgggtattatggtgggtgtttgtagttttagttatttgggaggttgaggtaggagaatggtgtgaatttgggaggtggagtttgtagtgagtggagattgtgttgttgtattttagtttgggtgatagagtatgagtttgttttaaaaaaagaaaaaaaagaaagaaaagaaaaga

SEQ ID NO: 14851 - DNA, 201 bp, Artificial Sequence
  Description of Artificial Sequence: Synthetic polynucleotide
gggttggttaaggttggagttggttttttttgtttgtggggaggtgtggagggagaggtgtaggtgggaattagggttgtgtggggtgtttgtgggtaagtgtgagttttgggtgggagtgggtttggtaaatttattttagggtgttttgttttttataaagaaaattttttttggggtttttatgggtttttttgggat

SEQ ID NO: 14852 - DNA, 201 bp, Artificial Sequence
  Description of Artificial Sequence: Synthetic polynucleotide
ttttaagtagttgggattataggtatttgttattatgtttggttaattttttgtattttttagtatagatggggttttattgtgttaattaggatggttttgattttttgattttgtgatttgtttgttttggttttttaaagtgttgggattataggtgtgagttattgtgtttagttatatattatattttttttattt

SEQ ID NO: 14853 - DNA, 201 bp, Artificial Sequence
  Description of Artificial Sequence: Synthetic polynucleotide
aattatggggtgaattttgttatggggatatgtatttggggggaaggttgtgatgggaggggtatttgggttaaatatgggtggttgttagtgaagagtttgtaagatagagtaggagttagggggaatagggagggaggggtattttttttttttttttttgagatggagttttattttgttttttaggttggagtgtag

SEQ ID NO: 14854 - DNA, 201 bp, Artificial Sequence
  Description of Artificial Sequence: Synthetic polynucleotide
tataggagtataaaagggttggtggttttgtttgggtatattgtttgtttttttatttatttgtgtattttagtttattatttttgagttgggtgtagtatgtggtttagagaatgggaagggatttatgagtgtttgatatatataattattgttgttggtgattatttttatttatgagtggtgtatggatggggttag

SEQ ID NO: 14855 - DNA, 201 bp, Artificial Sequence
  Description of Artificial Sequence: Synthetic polynucleotide
taaaggtttgtttttgtatttaagtatttgagtttttaagagttagtttttgggtttttttggagtaaggttttgtttggttttatgtatttgttttgtttgttgtgatggtgagtttgttgttgggtttgtttttgttaatttggtttttggtgtatatgtggatgttgtaggtggaggaagggtggatattaatgatgg

SEQ ID NO: 14856 - DNA, 201 bp, Artificial Sequence
  Description of Artificial Sequence: Synthetic polynucleotide
tttggttggttttgggatttgttttttggtggttaagtagtggttatgaaagtttagttgttgttatatttttgaggaattggtgtatttttgtttatagtggtagttgggggtatttatgtggtttggggttgttttgatttggtagtgtatgggggttgttgtttgggttttttagtgtgttatttgtgtgttttttgt

SEQ ID NO: 14857 - DNA, 201 bp, Artificial Sequence
  Description of Artificial Sequence: Synthetic polynucleotide
tttggtgttggtatttattagtgtggttagtttggttgaagttttgtggaagggtgggattaggtgttgtattgttgtgtttagggattggaattggtgttgtttgtaggttatgaggtttattatggagtttagtgttgtattttgtgagaggggtggatgtgggggttgtagggattttagatggtttgggattgattt

SEQ ID NO: 14858 - DNA, 201 bp, Artificial Sequence
  Description of Artificial Sequence: Synthetic polynucleotide
tggttattttgggagtttgttgttgatgaattgtagtatggttatttgggttgtttattttgtatggttatgttgtttggttattgttgtaggtatgttttgttttgtttaattttttggttggtggggttatttgggtgtttgtatatgattttttttgagagggttagaggttggtttaattatttgtaaataatgtta

SEQ ID NO: 14859 - DNA, 201 bp, Artificial Sequence
  Description of Artificial Sequence: Synthetic polynucleotide
ttagtatataggatatttatgtgtgtttattatttggtatatgggagatttatgtgtgtttattgttgggtataggggagatttatgtgtgtttattgtttggtatatgagagatttatgtgtgtttattgtttggtatagggagatttatgtgtgtttattgtttggtataggggagatttatgtgtgtttattgtttgg

SEQ ID NO: 14860 - DNA, 201 bp, Artificial Sequence
  Description of Artificial Sequence: Synthetic polynucleotide
aggggaatagtaatagaagttttatttattaggtatttattgtgtgttaagtattgtgttaagggttttatagaataatagtataagaattttggttgggtgtagtggtttatttttgtaattttagtattttgggaggttgaggtgggtggattatgaggttaggagttagagagattagtttagttaatatggtgaaat

SEQ ID NO: 14861 - DNA, 201 bp, Artificial Sequence
  Description of Artificial Sequence: Synthetic polynucleotide
tgtatgtattgtgtgtgagttgaagtagggtgaggtattgttttatttgggaagtatgaggggttagggagtttttatttttagttaaagaaaggggtgatggatgtatttggaaaattgggttatttttatttgaatattgtgtttttttggtgggtttaaaaaatggtgtattatgagattatattttatatttggttc

SEQ ID NO: 14862 - DNA, 201 bp, Artificial Sequence
  Description of Artificial Sequence: Synthetic polynucleotide
gtttgttattatgtttggagaattttttgtatttttagtggagataggtttttattatgttagttaggatggttttgattttttgattttgtgatttgtttgttttggttttgtaaagtgttgggattataggtgtgaggtatagtgtttggttttgattgttttatttaaagtaatgaaagtatagttggttttaaagga

SEQ ID NO: 14863 - DNA, 201 bp, Artificial Sequence
  Description of Artificial Sequence: Synthetic polynucleotide
tttgtggttagttggattaggtggttggtagtgagatggaataagtagattaggttgagggtgaaggtgtaggtgattagtagtatggataagaggttgttgtttgttattttttttattgtttggtttagtatttatttatttgtttgtagtaagtttagtagtattattttggttgttgttgttattttattttgttgg

SEQ ID NO: 14864 - DNA, 201 bp, Artificial Sequence
  Description of Artificial Sequence: Synthetic polynucleotide
ttagattgttttttttttgagatagagttttgttttgttatttaggttagagtgtggaggtgtgattttagtttattgtaagttttgttttttgggtttatgttatttttttgttttagttttgtgagtagttgggattataggtgtttgttattgtgttggttaatttttttggtatttttagtagagatagggttttat

SEQ ID NO: 14865 - DNA, 201 bp, Artificial Sequence
  Description of Artificial Sequence: Synthetic polynucleotide
atagtttattaaaaatataaaaaaaaaaaaaaaaaaatttgttgggtgtggtggtgtgtgtttgtaattttagttatttgggaggttgaggtaagagaattgattgaatttgggaggtagagattgtagtgagtttagattatgttattgtattttagtttggataagagtgagattttattttaaaaataaaaataaaaa

SEQ ID NO: 14866 - DNA, 201 bp, Artificial Sequence
  Description of Artificial Sequence: Synthetic polynucleotide
tgtttttttttgttttgagatggagttttattttattgtttaggttggagtgtagtggtgttattttggtttattgtaatttttattttttgggttttagtgatttttttgttttagttttttaagtagttgggattgtaggtgtttataattatgtttggttaatttttgtgtttttagtagagttggagttttattatg

SEQ ID NO: 14867 - DNA, 201 bp, Artificial Sequence
  Description of Artificial Sequence: Synthetic polynucleotide
tgtttgttattaagtttagttaatttttgtatttttagtagagatggggttttattgtgttggttaggttggttttgaatttttgattttgtgatttgtttgttttggttttttaaagtgttaggattataagtgtgagttattgtgtttggttttttaaatggtatttttgattttttttttttagtttttaaagtaggt

SEQ ID NO: 14868 - DNA, 201 bp, Artificial Sequence
  Description of Artificial Sequence: Synthetic polynucleotide
gttaaggtgggtggattatttgaggttaggagtttgagattagtttggttaatatggtgaaattttatttttattaaaaatatggaaaaaattagttgggtggggtttgagtttgtaattttagttatttgggagttgaggtgtgagaattgtttgaagttgggagggggaggttgtaggagtagaggttgtgttattgta

SEQ ID NO: 14869 - DNA, 201 bp, Artificial Sequence
  Description of Artificial Sequence: Synthetic polynucleotide
ggtttgtatggtgtgtgattatttttagtggaagttttaatatgggtgtggtttagttttttagggttttttaaggtagaggtggtttgggtttttgtagtgattttataatatattttaattgtagatggtggagattgtgggttgttttttggtttaagtggttttggggtttttgttttgtgtggagttatttgtgtt

SEQ ID NO: 14870 - DNA, 201 bp, Artificial Sequence
  Description of Artificial Sequence: Synthetic polynucleotide
gtgttttgggttattgagagaagtgaaatattgtagatatggtagaggtgttttttttttttttttgtttttagatgtggtttttatatgtaggttgatgtgttttttttttatttatgtttgtttggttttgttatatatgttgttgtgttgttggttttgaatgtgtatgagtggtttgtgttggggttagtggaggtt

SEQ ID NO: 14871 - DNA, 234 bp, Artificial Sequence
  Description of Artificial Sequence: Synthetic polynucleotide
aggggttatatttatggatttttttttttttggtaggaagatgagtgattatatttttgttattattgaattgagtgttttgtttgtttggtgttagtattgtttgtattattattttgattttatttattattgtttggtggatgggtggaggttttggtaggtttgtgatatggtgtattattttattattgaagttatttaggaatggtggtgggtattgtgttagtaggg

SEQ ID NO: 14872 - DNA, 201 bp, Artificial Sequence
  Description of Artificial Sequence: Synthetic polynucleotide
ggggttttttgtttttagtattgttagtttaggtgtgttttttatggtgtgatgtgtttgtagatttggaaatattataggatttaggtattttatggagtgtttgttttgtgttagttttagtttagtgttttttagatattgtttgattttttggaggtagttattgatattgtgtttattgtatagatgagaaagttg

SEQ ID NO: 14873 - DNA, 201 bp, Artificial Sequence
  Description of Artificial Sequence: Synthetic polynucleotide
tttttagtgagatgaatttggtattttagatggaaatgtagaaattatttgttttttgtgttgtttatgttgggagttgtagattggagttgtttttatttggttattttggttttttttttttgttttttttttgagatagtgtttttttttatttttgttatttaggttgtagtgtagtggtgtggtttgtgtttattg

SEQ ID NO: 14874 - DNA, 201 bp, Artificial Sequence
  Description of Artificial Sequence: Synthetic polynucleotide
taattttattttgtttttgagatagagttttgttttgttgtttaggttggagtgtagtggtgtaattttggtttattgtaagttttgttttttgggtttatgttatttgtttgttttagttttttgaataattgggattataggtgtttgttattatgtttggttaaatttttgtatttttagtagagatggggttttatc

SEQ ID NO: 14875 - DNA, 201 bp, Artificial Sequence
  Description of Artificial Sequence: Synthetic polynucleotide
atttttagggttgtggatggtagaattaaaagagttaattagtaagtagaattgttttttttggggttttaaggtttgagtattttttttggggtgttattgtattttttttggggtgatatgtttggtttagttgtaagttttgtttagaatttgtttgtgtattggtgtttggaatagttagttggattttatatttat

SEQ ID NO: 14876 - DNA, 201 bp, Artificial Sequence
  Description of Artificial Sequence: Synthetic polynucleotide
ggtttttgtagggagtttatattagtagttttttattttgaggagatatgtgggttttttttttgaagtttgtttaggaggtagatggagtgatttgatttggaggataggagggtgtttaggggttttggtgttatagtttttataggatgattttggagtgtttttggattttgagttgttttggttaaggagttgtat

SEQ ID NO: 14877 - DNA, 201 bp, Artificial Sequence
  Description of Artificial Sequence: Synthetic polynucleotide
tatatataggtgtggatatttatatggtttttggtagtgttgtaggaggttagtatagagatgtgttgaggagtttgagatgtttgtttttttgggttattgtgtgtaaaggttgtttttgttgtggatttttatatgtgtgatatatatgaataggtgaaatggatatgtatggtttttatatatgtgagttgggttttt

SEQ ID NO: 14878 - DNA, 201 bp, Artificial Sequence
  Description of Artificial Sequence: Synthetic polynucleotide
tttttgtgaaggtattaagtatggtagatgtttttatattgttggggtttgtttttttgtggatgggaagtgggaatgtgatgtggatgtgatgtgggaatgtaatgtgatgtgatgtgatgtgatgtggtatggtgtgaggatagtgtggtgggagtggtgttttagatttagtagggagggagatgaaaggtggatgga

SEQ ID NO: 14879 - DNA, 201 bp, Artificial Sequence
  Description of Artificial Sequence: Synthetic polynucleotide
gttgggtgtggtggtatgtgtttgtagttttagttatttaggaggttgaggtaggagaattttttgaatttgggatgtagaggttgtagtgagttgagattgtgttattgtattttagtttggtaatagagtgagattttggtttaaaaaaaaaaaaaaagaaaaaaaaaaaaaaaagaaggagttgaggttttaagaatt

SEQ ID NO: 14880 - DNA, 201 bp, Artificial Sequence
  Description of Artificial Sequence: Synthetic polynucleotide
ttgtattttgtgggtaggggatattttttttagtggttggtgatgattgtgattttatttgttgagttttgtgggagttttggtagttttttgtaattgttggttggttgttattgttttagtgtttgttttttgattggttagtaaattatggtggtagatagaaaaaagatagtttttttttttagggttgttttataa

SEQ ID NO: 14881 - DNA, 201 bp, Artificial Sequence
  Description of Artificial Sequence: Synthetic polynucleotide
ttttgttggtgtattttgttggtgtattttgttggtgtattttgttggtgtattttgttggtgtattttgttggtgtattttgttggtgtattttgttggtgtaagttgtgttttgggattgggtttgaaaagggaggagttatttattttaagtttttaggtttggggagaattttatagtaagttttttgggagtttga

SEQ ID NO: 14882 - DNA, 686 bp, Artificial Sequence
  Description of Artificial Sequence: Synthetic polynucleotide
gtggtatttgtaggtttttaggattaggtagaggatttagtttttttaggattggggttttggtgttgtgttttaggggaggttgatgggggttgggaggtgtttagggtgggaatttagtgtatgggtgaggattttaaaaagtaaggggtaggatgagttaataaggttttgagtaggaaaattatgtgataggaagtgtatatattgttttatagtagaaagattggggatgggattagtttttaagtgattttaaatttaaaaggaagtaatttttagatttttatgggtgttttaatttgttttgggtgaaggaagataggtaagaatttttaggtttgtgaggattttatgttttagggatagaagtgttagggatttgggaagtgtagatttaatataaggtagagtaaaatttatgtgttttggtaggatttttattttatgtgatttatttttgggtttgttgtgtaggatagaagttagttttgggtggggtttttgaatatggtggtggggtttgggtgggatagaggtggggtgtgaggtggagagattttgttttttagaataggtaaagggtggggttgggattagatttgtgtatttttttgttttgtatttagtgtttttgttttttgggtgtttggaggtgagagtggttaggaaggttgaggtatgat

SEQ ID NO: 14883 - DNA, 201 bp, Artificial Sequence
  Description of Artificial Sequence: Synthetic polynucleotide
gttagagtgtagtggtgtgattttggtttattgtaagttttgttttttgggtttatgttatttttttgttttagtttttttagtagttgggataggggtatgttgttatgtttggttagtttttgtatttttagtagagatggggttttattatattagttaggatggttttgattttttgattttgtgatttgttagttt

SEQ ID NO: 14884 - DNA, 201 bp, Artificial Sequence
  Description of Artificial Sequence: Synthetic polynucleotide
gttagagattttgtttttaaaagtaaaaaagaaaaaaaaagtttttttttaagttattatatattttgaataattaatattgaaaattgttggttgggtgtggtggtttatgtttgtaattttagtattttgggaggttgaggtggggtggattatgagattagtagaatggtgtgaatttggaaggtggagtttgtagtg

SEQ ID NO: 14885 - DNA, 201 bp, Artificial Sequence
  Description of Artificial Sequence: Synthetic polynucleotide
ttgtatttttatttgaggtattgggtttattttattagggagtgttagatagtgggtgtaggttagtgggtgtgtgtattgtgtgtgagttgaagtagggtgaggtattgttttatttgggaagtgtaaggggttagggagttttttttttgagttaaagaaaggggtgatggatgtattttgaaaattgggttattttta

SEQ ID NO: 14886 - DNA, 201 bp, Artificial Sequence
  Description of Artificial Sequence: Synthetic polynucleotide
atgtatttattgatttgtgtttattgtttggtagtttttagtgagatgaatttggtattttagttggaaatgtagaaattattattttttgtgttgtttatgttgggagttgtagattggagttgtttttatttggttatgttggttttttttttggatataattatttttgtatttatttaatttttatttttatggaat

SEQ ID NO: 14887 - DNA, 201 bp, Artificial Sequence
  Description of Artificial Sequence: Synthetic polynucleotide
tttttatgtgattattgtttgtttgttagtgttagttttttttgattttaaattataagtggaagaaagtatgttagaaatttatagaattggtttggtgtggtggtttaggtttgtaattttagtattttgggaggttgaggtaggtggattatgaggttaggagattgagattattttggttaatagggtgaaattttg

SEQ ID NO: 14888 - DNA, 201 bp, Artificial Sequence
  Description of Artificial Sequence: Synthetic polynucleotide
aagttttttttttttttttttttttttttttttgagatggagttttatttttttgtttaagttggattgtagtggtgttattttggtttattgtaagttttgttttttgggtttatgttatttttttgttttagttttttgagtagttgggattataggtgtttattattatgtttggttaattttttgtatttttagtag

SEQ ID NO: 14889 - DNA, 201 bp, Artificial Sequence
  Description of Artificial Sequence: Synthetic polynucleotide
tgtttggtgtatgttgtggagggtgtgggtaatggtgtatattgtattaattataaattgtattttgtttttttgtttgtaggtggagttttggttgatgtgttttttgtttgttttagggatgtttagagaaagtgtgtttggtttttatgtattgaatttggttttttgttttttttttttttatttttattatttttt

SEQ ID NO: 14890 - DNA, 201 bp, Artificial Sequence
  Description of Artificial Sequence: Synthetic polynucleotide
gattttagggggttttattttagtggttttttttattttttttgtagagaaaaaagagtgttggtgggattattgtttattgtgtgtttaggaggtgttttgtaatatggtgtattttaatgtgatttgtgatggttgtaatgggtttgtggtaggaatttgttataagtgtagtgtttgtttagattatgatttgtgtag

SEQ ID NO: 14891 - DNA, 201 bp, Artificial Sequence
  Description of Artificial Sequence: Synthetic polynucleotide
ggtattttatttatttagagatagagttttgttgtgatgtttaggttggagtgtatggtgtaattttggtttattgtaggttttgttttttgggttttagtgatttttttgttttagttttttgagtagttggggttatagttatgtgttattatgttgggttaatttttgtatttttagtagagatagggtttttttata

SEQ ID NO: 14892 - DNA, 201 bp, Artificial Sequence
  Description of Artificial Sequence: Synthetic polynucleotide
ttattatgtttaattaattttttttatttgtagtagagatagggttttattgtgttagttaggatggttttgattttttgattttgtgatttgtgtgttttggttttttaaagtgttgggattataggtgtgagttattgtgtttggtttgtaaatattttttgtgttttagtgggttatgtttttattttgttgattgtt

SEQ ID NO: 14893 - DNA, 227 bp, Artificial Sequence
  Description of Artificial Sequence: Synthetic polynucleotide
ttagttttttgagtagttggaattataggtgtttgttattatgtttggtttattttttgtatttttagtagagatggggttttattatgttagttaggattgttttgattttttgattttgtgatttgttggttttggttttttaaagtgttgggattataggtgtgagttattatgtttagttttagaaattgaaatgtatattattaagtgaaagaagttaattt

SEQ ID NO: 14894 - DNA, 201 bp, Artificial Sequence
  Description of Artificial Sequence: Synthetic polynucleotide
tttttttttagttttgttgttattttgtagtttgattttagattgttgtgttagtaattagtgagattttgagttaggtgtgggatataattttgtggtgtgttgttttttaagttggttggaaaagtgtaatatttgggtgggagtgatttgattttttaggtgtgtttgttatttttttttttgatttggaaagggaat

SEQ ID NO: 14895 - DNA, 201 bp, Artificial Sequence
  Description of Artificial Sequence: Synthetic polynucleotide
aggtgtgtttgttatttttttttttgatttggaaagggaattttttgattttttgtgttttttaagtgaggtaatgtttttttttgttttggtttgtgtatggtgtatgtttttattgatttgtgtttattgtttggtttttttaagtgagatgaatttggtattttagatggaaatgtagaaattatttgttttttgtgt

SEQ ID NO: 14896 - DNA, 201 bp, Artificial Sequence
  Description of Artificial Sequence: Synthetic polynucleotide
tgtttttttgttttagtgtttatattgtaaaaaagtgttttttttattgggtgtggtggtttatgtttgtaattttagtattttgggaggtagaggtgggtggattatgaggttaggagattgaaattattttggttaatatggtgaaattttgtttgtattgtgaatataaaaaattagttgggtgtggtggtgggtgtt

SEQ ID NO: 14897 - DNA, 201 bp, Artificial Sequence
  Description of Artificial Sequence: Synthetic polynucleotide
gttgggtgtggtggtgggtatttgtagttttagttatttgggaggttgaggtaggagaatggggtgaatttgggaggtggagtttgtagtgagttgagattgtgttattgtattttagtttgggtgatagagtgagattttattttaaaaaaaaataatattaggattgaagtttgttttttaatttttagtgatatggtt

SEQ ID NO: 14898 - DNA, 201 bp, Artificial Sequence
  Description of Artificial Sequence: Synthetic polynucleotide
tgaataagaaagggttattatattttattttgaaatggtttttggagaaagaatggaagtaaattgtataagtgggtgtttatttttttttatttggttatggttattgtggtgtttggttaggtttttggtgatgtgaggtaaatttttttgttggtaaattagtttatatattttttttattgtagatggttatttaga

SEQ ID NO: 14899 - DNA, 201 bp, Artificial Sequence
  Description of Artificial Sequence: Synthetic polynucleotide
ttaagtatttttttgtgatttgtttagaggaatttttggtagtggggatggtgttatttttatttgagagatgaggagattgaggtttagaggggggatgtggtttgtttgagttatattgattgagaggggtagatttggatttgtttgtagtttaagtttttagagattttggtgtggtttgttgggtagttagtttgt

SEQ ID NO: 14900 - DNA, 201 bp, Artificial Sequence
  Description of Artificial Sequence: Synthetic polynucleotide
gtgtgattttggaggggtaagaattattttggtagttatgggggagtttatgagtgtttgataagaggttatgtttttttgggattttttagaaagttagtggaggggttggggatagtagttgttttgggtttaaggtgagtagtattgttgtttttgaggatggtgtgtaggtgaaggtattgttgattttaggttggg

SEQ ID NO: 14901 - DNA, 201 bp, Artificial Sequence
  Description of Artificial Sequence: Synthetic polynucleotide
tttggatatttaggttatttttgaattttaaggtttttaattgtagttatatgtatagaggtttttttgttatgtggggtaatatggttatagggtaagatggttatgggttttagatatttttgggttattattttgtttattgtaggtggatatagttatggaatggaagtaatttttttgattatttatggtagtttt

SEQ ID NO: 14902 - DNA, 201 bp, Artificial Sequence
  Description of Artificial Sequence: Synthetic polynucleotide
gatttttttgagtttgttgggagatagttatgttaatggttataatgggtatagtgtttaggaatgtagtaatttagttagttgttagttttttttttggtgtgggtattatttaatgtgtttatttggggtttagatgtgataaattggttgagggattttgggttttggttgggatgagtgtagtaaatttgttgttat

SEQ ID NO: 14903 - DNA, 201 bp, Artificial Sequence
  Description of Artificial Sequence: Synthetic polynucleotide
ttttgaatagtagtaggtagtagagttttagggagagtaggtttttgtggtgtagtattatggttttgtgttttattttggagaagttgatggagatgtgtgttttggggatgggttttaggattagtttttttgtggtttggttgttgtttgggagtggttgttggtggatggtgtagtgtagaggtaggatgttggggg

SEQ ID NO: 14904 - DNA, 201 bp, Artificial Sequence
  Description of Artificial Sequence: Synthetic polynucleotide
atagggttttattttgttagttaggatggttttgattttttgattttgtgatttgttagttttggttttttaaagtgttgggattataggtgtgagttattgtattgggttggtagttattttttttaagtagtagttttattttttagtataaattaatgttgtagtttttaaattatttgttgaagtgtttttgaattt

SEQ ID NO: 14905 - DNA, 201 bp, Artificial Sequence
  Description of Artificial Sequence: Synthetic polynucleotide
ttttttttttttttttgagatagaattttgttttgttgtttaggttggagtatagtggtgtgatattagtttattgtaaattttattttttgggtttaagtgatttttttgttttagttttttgagtatttgggattatagggagtgtttttatatttggttaattttttgtatttttagtagagatagggttttattgtg

SEQ ID NO: 14906 - DNA, 201 bp, Artificial Sequence
  Description of Artificial Sequence: Synthetic polynucleotide
aatagttgggtgtggtggtttatatttgtaattttagtattttgggaggttgaggtgggtagattatgaggttaggaaattgagattattttggttagtatggtgaaattttgtttttattaaaaatataaaaaaaattagttgggtgttgtggtggatgtttgtagttttagttatttttaaggttgaggtaggagaatg

SEQ ID NO: 14907 - DNA, 201 bp, Artificial Sequence
  Description of Artificial Sequence: Synthetic polynucleotide
ttgatttggaaagggaattttttgattttttgtgttttttaagtgaggtaatgttttgttttgttttggttggtgtatggtgtgtgtatttattgatttgtgtttattgtttggttttttttagtgagatgaatttggtattttagatggaaatgtagaaattatttgttttttgtattgtttatgttgggagttgtagat

SEQ ID NO: 14908 - DNA, 201 bp, Artificial Sequence
  Description of Artificial Sequence: Synthetic polynucleotide
tttttattttgttttttagatagaattttgttgtgttatttaggttggagtgtagtggtgtgattttggtttattgtaatttttgttttttgggtttatgtgatttttttgttttagttttttaagtagttgggattgtaggtgtgtattattatgtttatattaagtttttgtatttttagtagagatggggttttgtta

SEQ ID NO: 14909 - DNA, 201 bp, Artificial Sequence
  Description of Artificial Sequence: Synthetic polynucleotide
tagtgaaattttgtttttattaaaaatataaaaaattagtttggtgtggtgaagggtatttgtagttgtagttatttaggaggttgaggtaggagaatggtgtgaatttgggaggtggagtttgtagtgaattgagattatgttattgtattttagtttgggtgatagagtgagattttgttttaaagaaatagaagattt

SEQ ID NO: 14910 - DNA, 201 bp, Artificial Sequence
  Description of Artificial Sequence: Synthetic polynucleotide
ttttgtgaaaaataaaaaaaataagttgggtgtggtggtttatgtttgtaattttagtattttgggaggttgaagtaggtagattatgaggttaggagattgagattattttggttaatgtggtgaaattttgtttttattaaaaatataaaatattagttgggtgtagtggtgggtgtttgtagttttagttatttggga

SEQ ID NO: 14911 - DNA, 201 bp, Artificial Sequence
  Description of Artificial Sequence: Synthetic polynucleotide
gagttaaagtgatatgtttgtttgggttttttaaagtgttggaattatagatttgagttattgggtttagtttaattattttttttagtttgagtatgagtgttggaagaaaagtttttatttgtatttattttttttagatatagggtttttttttgttatttaggttggagagtagtggtgtaatttttgtttggttta

SEQ ID NO: 14912 - DNA, 201 bp, Artificial Sequence
  Description of Artificial Sequence: Synthetic polynucleotide
ggagtatgaggtaggagagttatttgaatttgggaggtagaggttgttgtgagttgagattatatttttttattttagtttgagtggtagagtaagattttgttttaaaaaaaaaaaaaaaaagttgggggaaggagagaaaaatagagagtttagtggggtaattttttatttagtttttgttatttgttattgttttag

SEQ ID NO: 14913 - DNA, 201 bp, Artificial Sequence
  Description of Artificial Sequence: Synthetic polynucleotide
atatttggtttttgggatttgtatatttttgttttttttgggtggaaagatggtttttttgattagggtttttttgtgttttagagggtatgtttttttttgtaagtgtgagttgtatattagtgagtatgtgtttttatttttagggatattggttattaggtttggggttagatggtaggatttttgttttttttttta

SEQ ID NO: 14914 - DNA, 201 bp, Artificial Sequence
  Description of Artificial Sequence: Synthetic polynucleotide
ttataggtgtttgttattatgtttggttaattttttgtgttttgtttagtagagatggggttttattgtattagttaggatggttttgatttgttgattttgtgatttgtttgttttggttttttaaagtgttgggattataggtgtgagttattttgtgtttggtttttttatttttatattttaaattagagatgattt

SEQ ID NO: 14915 - DNA, 217 bp, Artificial Sequence
  Description of Artificial Sequence: Synthetic polynucleotide
tataggtgttttttattatgtttggttaattttttgtatttttagtagagatggggttttattgtgttagttaggatggttttgattttttgattgagattgtgtttttttgattgtgtttggttgattttttttttttttttatttgttttttttttttttattattattaaaagtttattgttttatatttttttttttttaattttatttaaaa

SEQ ID NO: 14916 - DNA, 217 bp, Artificial Sequence
  Description of Artificial Sequence: Synthetic polynucleotide
ggtttatagtttttagtttgagtgatgtagaagatgggtgatttttgtatttttatttgaggtattgggtttattttattagggagtgttagatagtgggtgtaggttagtgagtgtgtgtattgtgtgtgagttgaagtagggtgaggtattgttttatttgggaagggtaaggggttagggagtttttttttttagttaaagaaaggggtgatgg

SEQ ID NO: 14917 - DNA, 201 bp, Artificial Sequence
  Description of Artificial Sequence: Synthetic polynucleotide
gtttgttattatgtttggttaaatttttgtatttttagtagagatggggttttattttgttaattaggatggtgttgattttttgattttgtgatttgtttgttttggttttttaaagtgttgggattataggtgtgagttattgtgtttggtttggaaattgttttttatgtagttgatttattttaatttttattagta

SEQ ID NO: 14918 - DNA, 201 bp, Artificial Sequence
  Description of Artificial Sequence: Synthetic polynucleotide
tatatgattttgaataagttttgaattatttatatgtgattttttggttttatatgaggtagaatagtatggtgtggattgggaattttgatgtgggagttgaaagatggggaggttgtgggtatggtttttggagttttgggattgagatatgtaggtattttagatgggtttgttgttataataagtgggaaattttta

SEQ ID NO: 14919 - DNA, 201 bp, Artificial Sequence
  Description of Artificial Sequence: Synthetic polynucleotide
tttagagaagatttggtagtttttttagtttttggtttttgtttttgttttttttttttttgtttttaggttttttttttgtagttttttagttttttattgtgttttgtgtttttggttttttttttttttagtgttttttttatttggtgttgtttggttgtaattttggtttttttggggaagaggtttggattttat

SEQ ID NO: 14920 - DNA, 201 bp, Artificial Sequence
  Description of Artificial Sequence: Synthetic polynucleotide
tgtttttatattggaaaaatttaaatatttttaagagtttgattattggttgggtgtggtggtttaatgtttgtaattttagtattttgggaggttgaggtggttggattataaggttaggagattgtgattattttggttaatatggtgaaattttgattttattaaaaaaatataaaaaaattagttgggtgtggtggc

SEQ ID NO: 14921 - DNA, 201 bp, Artificial Sequence
  Description of Artificial Sequence: Synthetic polynucleotide
gatttggttgtttagaagtgtgtgttattttggattgagttaagatggttgaataggaatagttttggtttatagtttttattgtgagtgatgtagaagatgggtgatttttgtatttttatttgaggtattgggtttattttattagggagtgttagatagtgggtgtaggttagtgggtgtgtgtattgtgtgtgagtt

SEQ ID NO: 14922 - DNA, 201 bp, Artificial Sequence
  Description of Artificial Sequence: Synthetic polynucleotide
ttttggttgggtgttgtggtttatgtttgtaattttagtgagaggtgatagtatgttggtagtttttgtagtttttttttattagtgtgatttttgggtgtgtgtgggttgggttggtttgtatttggagtggttagtagttttgggtagtgaggggtttagtatttgggttagtagttgttgtgtttgattttttgttag

SEQ ID NO: 14923 - DNA, 201 bp, Artificial Sequence
  Description of Artificial Sequence: Synthetic polynucleotide
tgtggttgggtgtggtggtttatttttgtaattttagaattttgggaggttgaggtgggtggattatgagattagtagattgagattattttggttaatatggtgaaattttgtttttattaaaaatatagaaaaagtagttgggtgtggtggtgggtatttgtagttttagttataggttgaggtagaagaatggtgtga

SEQ ID NO: 14924 - DNA, 201 bp, Artificial Sequence
  Description of Artificial Sequence: Synthetic polynucleotide
ttttggttttttaaagtgttggggttataggtgtgagttattgtgtttggttagttgtttttattaaaaatataaaaaattagtttggtgtggtggtgggtgtttgtagttttagttattttggaggttgaggtaggggaattgtttgaatttatgaggtggaggttttaagttgaggttgtgttattgtattttagtttg

SEQ ID NO: 14925 - DNA, 201 bp, Artificial Sequence
  Description of Artificial Sequence: Synthetic polynucleotide
ggttggagtgtagtggtgtgattttggtttgttataatttttattttttagtagtttgttttggttttttaaagtgttgagattgtagtttttgtttggttgttattttgtttgagaagtgaggagtgtttttgtttggttgttattttatttaggaagtgaggagtgtttttttttggttgttattttatttgggaagtg

SEQ ID NO: 14926 - DNA, 201 bp, Artificial Sequence
  Description of Artificial Sequence: Synthetic polynucleotide
gttttagttgtttttttgtggggtagggtttgggatttgtagtttgttatgtttgagttttttattttttttgtgggtttttgtgtggtttgagtttttttgatgagtgttattttttgttttatggtatttagttttattgattatttaagggttgaggagtgtgggtgtatagtattgggattggtaggtagttttatt

SEQ ID NO: 14927 - DNA, 286 bp, Artificial Sequence
  Description of Artificial Sequence: Synthetic polynucleotide
gaagatgggtgatttttgtatttttatttgaggtattgggtttattttattagggagtgttagatagtgggtgtaggttagtgggtgtgtgtattgtgtgtgagttgaagtagggtgaggtattgttttatttgggaagtgtaaggggttagagagttttttttttgagttaaataaatgggtgatggatgtatttggaaaattgggttatttttatttgattattgtgttttttagattggtttaaaaaatggtgtattatgagattatattttatatttggttc

SEQ ID NO: 14928 - DNA, 201 bp, Artificial Sequence
  Description of Artificial Sequence: Synthetic polynucleotide
gttttagttgtttttttgtggggtagggtttgggatttgtagtttgttatgtgtgagtttttttttattgttttaggtttttgtgtagtaggagtttttttgatgagtattgttttttgttttatggtatttggttttattgattgtggaatggttgaggagtgtgggtataaggtatgggattggtaggtagttttgttt

SEQ ID NO: 14929 - DNA, 201 bp, Artificial Sequence
  Description of Artificial Sequence: Synthetic polynucleotide
ggagtgtaatggtattattttggtttattgtaatttttgttttttgggtttaggtgatttttttgttttagttttttgagtatttgggattataggtgtgtgtttttatgtttaattaatttttgtatttttagtagagatggagttttattatgttggttaggtttgttttgaatttttgattttgtgatttatttgttt

SEQ ID NO: 14930 - DNA, 201 bp, Artificial Sequence
  Description of Artificial Sequence: Synthetic polynucleotide
tttttgttatttttttttttgatttggaaagggaattttttgattttttgtgttttttgagtgaggtaatgttttgttttgttttggtttgtgtatattgtgtatatttattgatttgtgtttattgtttggtattttttagtgagatgaatttggtattttagatggaaatgtagaaattatttgttttttgtgttgttt

SEQ ID NO: 14931 - DNA, 201 bp, Artificial Sequence
  Description of Artificial Sequence: Synthetic polynucleotide
gatgtagaagatgggtgatttttgtatttttatttgaggtattgggtttattttattagggagtgttagatagtgggtgtaggtttgtgggtgtatgtattgtgtgtgagttgaagtagggtgaggtattgttttattttggaagtgtagggggttagggagtttttttttttagttaaagaaaggggtgatagatggtat

SEQ ID NO: 14932 - DNA, 201 bp, Artificial Sequence
  Description of Artificial Sequence: Synthetic polynucleotide
tttagttaattttttttatatttttaatagagatagggttttattatgttggttaggatagttttgattttttgattttgtgatttgtttgttttggttttgtaaagtgttgggattataggtgtgagttattgtatttggttggaagtatatattttaatagttttatatagtagttgttgttagaatttaaatgaagat

SEQ ID NO: 14933 - DNA, 201 bp, Artificial Sequence
  Description of Artificial Sequence: Synthetic polynucleotide
tagaagatgggtgatttttgtatttttatttgaggtattgggtttattttattagggagtgttagatagtgggtgtaggttagtgtgtgtgtgtattgtgtgtgagttgaagtagggtgaggtattgttttatttgggaagtgtaaggggttagggagttttttttttgagttagggaaaggggtgatggatggtatttgg

SEQ ID NO: 14934 - DNA, 201 bp, Artificial Sequence
  Description of Artificial Sequence: Synthetic polynucleotide
ttggtagggttggttggttgtttttagtgtggggtttgttaagtttatgtttatttggaattttagttggtttgtaagtattatgtatagtttgggtttttgtttatgtttttttatttatatttttttgtaagttgagggagtgggttttggttttggttagtttagaaaggggtttttatagtgtagtggtgggttgaa

SEQ ID NO: 14935 - DNA, 201 bp, Artificial Sequence
  Description of Artificial Sequence: Synthetic polynucleotide
tttgagatttttgtagttttggggtttgagttgaggggttattggtagtgttgtgggagttaggttgtttttttggaagttaggttgtttttgagtagagtggaggttttattgttttttggggggtatggtggtagtttttaggttgtattggggttggatgagttgggggtggagtataaggggttagttttttttttt

SEQ ID NO: 14936 - DNA, 201 bp, Artificial Sequence
  Description of Artificial Sequence: Synthetic polynucleotide
aaattttttgtttgtagggggtgggtggggaggtggaggaggggttgggttaaatgttgggggtgtgatttggggttgtgggtttttgggttttagtttttgggtttgttgagtgggtgagtggggtgttttattttttgtggtttttttttggtttttatagaatatggagaaggtgattttgttgttggtgatgtttat

SEQ ID NO: 14937 - DNA, 201 bp, Artificial Sequence
  Description of Artificial Sequence: Synthetic polynucleotide
gggtgtttgtagttttagttatttgggaggttgaggtaggagaatggtatgaatttgggaggtggagtttgtagtgagttgagattgtgttattgtattttggtttgggtgatagagtgagattttgttaaaaaaaaaaaaaaaaagtagttttgtaagattaggtgtttggtagataggtatatttagtaaagttataat

SEQ ID NO: 14938 - DNA, 210 bp, Artificial Sequence
  Description of Artificial Sequence: Synthetic polynucleotide
ttattaaaaatataaaaaaattagtttggtgtggtggtgggtgtttttagttttagttgtttgggaggttgaggtaggagaatggtgtgaatttgggaggtggagtttgtggtgagttgagattttgttatagtattttagtttgggtgatagagtgagattttgttttagaaaaaaaaaaaaaaaaaaaaaagaagtgggaatttagaa

SEQ ID NO: 14939 - DNA, 201 bp, Artificial Sequence
  Description of Artificial Sequence: Synthetic polynucleotide
ttttgggtttatgttatttttttgttttagttttttgagtagttgggattataggtatttggttaattttttgtattttttatagagatggggtttttattgtgttagttaggatggttttgattttttgattttgtgatttgtttgtttgggttttttaaagtgttgggattataggtgtgagttattgtgtttagtttg

SEQ ID NO: 14940 - DNA, 201 bp, Artificial Sequence
  Description of Artificial Sequence: Synthetic polynucleotide
gattgtttttttgttattgtatttatataatttgttttaaatgggtaatttattaagtatattttgtttttgtttttgttgtaggtttttgttggattgttgtttataagtttttatagtttgtgagtttttttagtttggtttggtttattttgtggtgtttatgtttattttgggttttttttgatttttttttaattt

SEQ ID NO: 14941 - DNA, 201 bp, Artificial Sequence
  Description of Artificial Sequence: Synthetic polynucleotide
gtagtgtagtggtgtaattttggtttattgtaagttttgttttttgggtttatgttatttttttgttttagtttttgggttagttgggattataggtgtttgttattgtgttaggttaattttttgtatttttagtagagatggggttttattatattagttaggatggttttgattttttgattttgtgatttatttgtt

SEQ ID NO: 14942 - DNA, 201 bp, Artificial Sequence
  Description of Artificial Sequence: Synthetic polynucleotide
tttgtgttttttttttttgagttggtgggttatagatgttggaagaaatttttgtatttgtagttggaattgtagtttatggtgttttggtttttttttttgttttgtttttttttggttaaataatatattaaagaggtgaggtaatgattgttggttagtttttattggggaaaaatttattgttaggatggtatgaat

SEQ ID NO: 14943 - DNA, 201 bp, Artificial Sequence
  Description of Artificial Sequence: Synthetic polynucleotide
ggaataaatatttttgttttataaagatttagaatttattggatattgataaaatgtttattagaggttggtgtagtggtttatgtttataattttggtgtggtggtttatatttgtaattttgatgtggtggtttatatatgtaattttagtattttgtaaggttaggtggggggattatttgagtttaggagtttatga

SEQ ID NO: 14944 - DNA, 201 bp, Artificial Sequence
  Description of Artificial Sequence: Synthetic polynucleotide
gtggtgtaattttggtttattgtaagttttgttttttgggtttatgttatttttttgttttaggtttttgagtagttgggattataggtgtatattattatgtttggttaatttttttgtatttttagtaaagatggggttttattatgttagttaggatggttttgattttttgattttgtgatttattagttttagttt

SEQ ID NO: 14945 - DNA, 201 bp, Artificial Sequence
  Description of Artificial Sequence: Synthetic polynucleotide
gtaaattttttgtaaaattttggttttttagattttagttgggtttttttttttaggtttttagtggtagttgtgttttttgtgtgtttatgttggttagtgtaagttatatatggatttagtgtttattgtatttttgttagttttagggttttagtttgttgttttgggagattttagttttggtttaggtattttttt

SEQ ID NO: 14946 - DNA, 201 bp, Artificial Sequence
  Description of Artificial Sequence: Synthetic polynucleotide
ttttaatttttttattaagatggagttttgttttattgtttaggttggagtgtagtggtgtgattatggtttattataatttttgttttttgggtttaagtgatttttttgttttagttttttgagtagttgggattataggtatgtgttattatgtttaggtaattttagtatttttagttgagatggggttttattatg

SEQ ID NO: 14947 - DNA, 201 bp, Artificial Sequence
  Description of Artificial Sequence: Synthetic polynucleotide
ttttgttaggtgtggtggtttatgtttgtaattttagtattttggaatgttgaggtaggtgaattatgaggttaagagattgagattatttttgttaatatggtgaaattttgtttttattaaaaatataaaaaattagttgggtgtgggggtgggtgtttgtagttttagttgtttgggaggttgaggtaggagaattgt

SEQ ID NO: 14948 - DNA, 201 bp, Artificial Sequence
  Description of Artificial Sequence: Synthetic polynucleotide
attattttttttttttttgagatggagttttgttttgttgtttatgttggggtgtagtggtatgattttggtttattgtaagttttgttttttgggtttatgttatttttttgttttaattttttgagtagttgggattataggtatatgttattatatttggttaatttttttgaatttttagtagagaggggttttatt

SEQ ID NO: 14949 - DNA, 201 bp, Artificial Sequence
  Description of Artificial Sequence: Synthetic polynucleotide
tttgtgaatttgggtggtgttttttttttgtattatttagatgtgtttttaggaaggatgtgttgttatgatttgttatggtggttttggggatggttagtggtgggatgatgggtgtgatgtggttttggggatggttagtggtaggatgatgggtgtgatgtatttgtgttatttgggatttaaatttatttatgattt

SEQ ID NO: 14950 - DNA, 201 bp, Artificial Sequence
  Description of Artificial Sequence: Synthetic polynucleotide
attgggttttattgtgttagttaggatggttttgattttttgattttgtgattagtttgttttggttttttaaagtgttggtattataggtgtgagttattgtttttggtaaagtttttttttgatggttttagtttgttggataagttaggaataaggttattggttgtaagggaggaggagtttttgtaggtggtagtg

SEQ ID NO: 14951 - DNA, 201 bp, Artificial Sequence
  Description of Artificial Sequence: Synthetic polynucleotide
ggtgatttaaattgtttatgtggaatatatatatatatatatatatatatatatatgtgttttagggatggatatatataaatatgtgttttaggggttttgtgtgaggagaggagatttatattattgatttagtaattagggttgattttagagggttggagtatatattttgggttgatgataggtgtttggttttgg

SEQ ID NO: 14952 - DNA, 201 bp, Artificial Sequence
  Description of Artificial Sequence: Synthetic polynucleotide
ttttggtttgtttttttttattttaggttgttttaatttttttttgaaagtttggtgtttattttttattttttgggaaatattttgttgttttggggtgtgttttgtgaaggagatatgttgggtgaaagttagggattttataattattttttgtttttattttgggtttagtgtaggggttgttgtgaaggtattggt

SEQ ID NO: 14953 - DNA, 201 bp, Artificial Sequence
  Description of Artificial Sequence: Synthetic polynucleotide
aggttgttgggaaggaattggtttttatggaagtgttttagtttttttgtttttttggttttttttttttggttgttttagtgttttattgaaagtttggtgttatatttttattttttgggaaattttatgtttttttggggtgttttttgtggggaagatatgtattttgggtgaaagttagggattttatgaatattt

SEQ ID NO: 14954 - DNA, 201 bp, Artificial Sequence
  Description of Artificial Sequence: Synthetic polynucleotide
attaatttaaatatttattaatgatagattggataaagaaaatgtggtggggtggagttaagatggttgaataggaatagttttggtttatagtttttagtgtgagtgatgtagaagatgggtgatttttgtatttttaattgaggtaatgggtttattttattggggagtgttggatagttggtgtaggatagtgggtgt

SEQ ID NO: 14955 - DNA, 201 bp, Artificial Sequence
  Description of Artificial Sequence: Synthetic polynucleotide
gtttgttattatatttggttaattttttgtatttttaatagagatggggttttattgtgttagtaaggatggttttgattttttggttttgtgatttgtttgtgttggttttttgaagtgttgggattataggtatgagttattgtgtttggttagaagtgtttttatttgtttgggaagttgtttttttttggtatttgt

SEQ ID NO: 14956 - DNA, 201 bp, Artificial Sequence
  Description of Artificial Sequence: Synthetic polynucleotide
ttttttattttaaggaataagtttttaattagattagatatagttataagtaaatataaattatgtttttatgtaattttaagagttattttaggttgggtgtggtggtttatgtttgtaattatagtatttttggaggttgtggtgggtggattatgaggttaggagattgagattattttggttaatatggtgaaatta

SEQ ID NO: 14957 - DNA, 201 bp, Artificial Sequence
  Description of Artificial Sequence: Synthetic polynucleotide
ggttaattaggggtatgtttttttatgtatatggtgggtatttttattttagttggttggtagtggtattgtatatggtattttatatttgtattttttttgttttggtttagtgtggttagggatgggttttgttagtttgtagtgttatttgttttgtgtaaggtttagaattgtttatttatgtaagttgggagtttg

SEQ ID NO: 14958 - DNA, 366 bp, Artificial Sequence
  Description of Artificial Sequence: Synthetic polynucleotide
tgagtgatgtagaagatgggtgatttttgtatttttatttgaggtattgggtttattttattagggagtgttaggtagtgggtgtaggttagtgggtgtgtgtattgtgggtgagttgaagtagggtgaggtattgttttatttgggaagtgttaggggttagggagttttttttttgagttaaggaaaggggtgattgatgtatttagaaaattgggttatttttatttgaatattgtgttttttagattggtttaaaaaatggtgtattatgagattatattttatatttggtttggagggttttatgtttatggaattttattgattgttagtatagtagtttgagattaaattgtaaggtgg

SEQ ID NO: 14959 - DNA, 201 bp, Artificial Sequence
  Description of Artificial Sequence: Synthetic polynucleotide
ataaaggttttttaagtttatattagatttatgagtttagttggttttatttagtggattttgtattgggggttgtaggtggagttgtttgttagttttgtgtagtgtttttatagtttttagtttttgggtggttgatgggattgggtgttgtggagtagggggtagtgtttattggggaggtttggttttgtaggagtt

SEQ ID NO: 14960 - DNA, 201 bp, Artificial Sequence
  Description of Artificial Sequence: Synthetic polynucleotide
ggtgttgtttgttatttttttttttgattaggaaagggaattttttgattttttgtgtttttggagtgaggtaatgttttgttttgttttggtttgtgtgtggtgtgttgtatttattgttttgtgtttattgtttggtattttttagtgagatgaatttggtattttatatggaaatgtagaaattatttattttttgtg

SEQ ID NO: 14961 - DNA, 201 bp, Artificial Sequence
  Description of Artificial Sequence: Synthetic polynucleotide
gttgttttgtagtttgattttagattgttgtgttagtaattagtgagattttgtgggtataggattttttgagttaggtgtgggatataatttttaggtgtgttgttttttaagtttgttggaaaagtgtagtattttggttggagtgatttgattttttaggtgttgtttgttatttttttttttgattgggaaagggaa

SEQ ID NO: 14962 - DNA, 384 bp, Artificial Sequence
  Description of Artificial Sequence: Synthetic polynucleotide
ttgaattgttttaattttaagtggtttagttttaagttttgtgagagtattattggttagggtttgtagattgtggttgttaattgttttgatttttagatgttgaatgtttaggattgtgaggtttttgtggaggttttgtgttttgttaaatgttattgtaagtgttgtgttattgagtatattaatttggtttttttttgaagggatagagtttatttggtgttgtatttatataaatttgaataaagtaaatttttttaaaagtagtgtatgtaagtattgatatttatttaaaatagtttttttttttgggaaggttattaggaatttggtttttatttttttttattttttatgggtaatagaggttaaagaaatgaa

SEQ ID NO: 14963 - DNA, 216 bp, Artificial Sequence
  Description of Artificial Sequence: Synthetic polynucleotide
gaagatgggtgatttttgtatttttatttgaggtattgggttaattttattagggagtgttagatagtgggtgtaggttagtgggtgtgtgtattgtgtgtgagttgaagtagggtgaggtattgttttatttgggaagtgtaaggggttagggagttttttttttgagttaaagaaaggggtgatggatgtagttggaaaattgggttattttta

SEQ ID NO: 14964 - DNA, 334 bp, Artificial Sequence
  Description of Artificial Sequence: Synthetic polynucleotide
tgatatagaagatggtgatttttgtatttttatttgaggtattgggtttattttattagggagtgttagatagtgggtataggttagtgggtgtgtgtattgtgtgtgagttgaagtagggtaaggtaatgttttatttgggaagtgttaggggttagggagtttttttttttagttaaagaaaggggtgatggatgtatttggaaaattgggttatttttatttgaatattgtgttttttggattggtttaaaaaatggtgtattatgagattatattttgtatttggtttggagggttttatttgatggagttttgttgattgttagtatag

SEQ ID NO: 14965 - DNA, 201 bp, Artificial Sequence
  Description of Artificial Sequence: Synthetic polynucleotide
gggattttaaggttttgttggtgtggtttaaaggtattggatgttggggttaagatgatttttgtgttgttatgaattaggttattggatgtgggttttgtgttgagtttgtagtttttgaggagttttttgggtttttttgttttgattatatttttttggatggttgttgggtttttgtttgttttgttttgtattgag

SEQ ID NO: 14966 - DNA, 270 bp, Artificial Sequence
  Description of Artificial Sequence: Synthetic polynucleotide
gttattgtattttagtatgggtgatagagttagtttgaaattttgttttgtgtttttttgagaagtgatagtgtattggtatggtagtttttatagtttttgtttgtttttggtgtttttttggttttggtatttattttggttgtgtttgaggagttttttagtttgttgttgtattgtggaagtttatttttgggttggttaaggttggagttggtttttttagtttgtggggaggtgtggagggagaggtatgggtgggaattgggg

SEQ ID NO: 14967 - DNA, 253 bp, Artificial Sequence
  Description of Artificial Sequence: Synthetic polynucleotide
tgtgagtgatgtggaagataggtgatttttgtatttttatttgaggtattgggtttattttattagggagtgttagatagtgggtgtaggttagtgggtgtgtgtattgtgtgtgagttgaagtagggtgaggtattgttttatttgggaagtgtaaggggttagggagttttgtttttgagttaaagaaaggggtgatggatgtatttggaaaattgggttatttttattggaatattgtgtttttttgatc

SEQ ID NO: 14968 - DNA, 204 bp, Artificial Sequence
  Description of Artificial Sequence: Synthetic polynucleotide
ttttagtaggggtggttgggtagaggtgttttttattttttggatggggtggttggttgggtaggggggttgattttttttattttttttttggatggggtggtggtaaagattgagatagttttgttgtttgttgaattttatttttttggttaaaattaagttttttaataaagattttgaagtgttgagtttattaattta

SEQ ID NO: 14969 - DNA, 228 bp, Artificial Sequence
  Description of Artificial Sequence: Synthetic polynucleotide
gttattttgtagtttgattttagattgttgtgttagtaattggtgagattttgtgggtgtaggattttttgagttaggtgtgggatatagttttttgatgtgttggtttttaagtttgtaggaaaagtgtagtatttgggtgggagaggtttgattttttatgtgttgtttgttatttttttttttgattaggaaagggaattttttgattttttgtgttttttgagt

SEQ ID NO: 14970 - DNA, 217 bp, Artificial Sequence
  Description of Artificial Sequence: Synthetic polynucleotide
tgtaggatgtagattgtagatgtttattgttttgtaggtagttttagtttgagtggtggttgtgttgggtttgtgtttggggtttttttttgtatgtttttgttttttagtgtttgtgatgatgtgtgatttattaattatttggatttagtgtatttttatgttaaatagtgtgtgtttatttgtaaagtatatgatagtttttgtggttattggg

SEQ ID NO: 14971 - DNA, 201 bp, Artificial Sequence
  Description of Artificial Sequence: Synthetic polynucleotide
ttatttttgaagttattgagattataagtttattggaaggaattaattttggatatattttgggtgtttgtttgggatattgttatatggtgagtattattggatttgtttgggatattgttatatggtgagtatttttggatttgttttattttttattttgttttatttttttttagaatttaggggttaaatattgga

SEQ ID NO: 14972 - DNA, 204 bp, Artificial Sequence
  Description of Artificial Sequence: Synthetic polynucleotide
aagataataaattggttttaaataaaaagtaagaaaaatgttggggaggagttaagatggttaaataggaatagttttggtttatagtttttagtgtgagtgatgtggaaaatgggtgatttttgtatttttattggaggtattgggtttattttattagggagtgttagatagtgggtataggttagtgggtgtgtgtattgt

SEQ ID NO: 14973 - DNA, 223 bp, Artificial Sequence
  Description of Artificial Sequence: Synthetic polynucleotide
tagtgggtatatagaggtagttgggatttgtttggaagagtttttgtttggggtaaggagttgggattgtgtttaggaggtagtggggagttttggagagtgaagtgttttttgtgtagatttgtgtgtttggagtattggagtttgtagggtaagagagggtttttagaagatttatgatgttttattgggatgtagagggaaatggttatttgtattttta

SEQ ID NO: 14974 - DNA, 201 bp, Artificial Sequence
  Description of Artificial Sequence: Synthetic polynucleotide
tttaaagtattaggattataagtagaattattgtgttttttgtttttttttttgtttttgtttttgttttgttgttgttgttgatgttgttatagagttttgtttttgttgtttaggttgggatgtaatggtgtgattttggtttattgtagtttttgttttttggttttaagtaatttttttgttttagttttgtgagta

SEQ ID NO: 14975 - DNA, 203 bp, Artificial Sequence
  Description of Artificial Sequence: Synthetic polynucleotide
agtataaataaattggttgggtggtagttttagttatttgggaggttgaggtagtagaatagtgtgaatttgggaggtggagtttgtagtgagttgagattgtgttattgtattttagtttgggtgatagagtgagattatgttttaaataaaaaaaaaaaaaaaaaaaaaaagtatttttttagatttagtttgatattagg

SEQ ID NO: 14976 - DNA, 201 bp, Artificial Sequence
  Description of Artificial Sequence: Synthetic polynucleotide
ttatgtttggttaatttttttgtattattagtagagatgaggttttattgaggttttattgtgttagttgggatggtttgggttttttgattttgtgatttgtttaatttggttttttaaattgttgggattataggtatgagatattgtgtttggttgttgtttgattttttttagtagtgttttgtagttttttttgta

SEQ ID NO: 14977 - DNA, 201 bp, Artificial Sequence
  Description of Artificial Sequence: Synthetic polynucleotide
tttttgagtagttgggattataggtgtttgttattttgtttggttaattttttgtatttttagtagagatggggttttattgtgttagttaggatggttttgattttttgattttgtgatttgttagttttggttttttaaagtgttgggattataggtgtgagttattgtgtttggtttaatttaatttttaataatggt

SEQ ID NO: 14978 - DNA, 201 bp, Artificial Sequence
  Description of Artificial Sequence: Synthetic polynucleotide
aaaagttatagggggtgtgaggatagatggtgtgtttttttttatatatatggagatgtaggttggagtaatggtatatggattatgtatatgtggtggatgtattaatgtttatgtagaagagaataaaagttgtttttaattgggtataaattttttgtatttaaatattttgatatttataaataaaattagaataga

SEQ ID NO: 14979 - DNA, 201 bp, Artificial Sequence
  Description of Artificial Sequence: Synthetic polynucleotide
tgatttgttttttttggttttttaaagtgttgggattataggtgtgagttattgtgtttggtttaggttattttttttttttttttttttttttttgaggtggagttttgttttgttgtttaggttggagtgtagtggtgtgattttggtttattgtaagttttgttttttgggtttatatgatttttttgttttagtttt

SEQ ID NO: 14980 - DNA, 201 bp, Artificial Sequence
  Description of Artificial Sequence: Synthetic polynucleotide
ggattataggtgtgagttattgtgtttggtttaaattatggattttttttttttagtggagttttgtttttgtttaggttggaataggatggtatgaatttggtttattgtaatttttattttttgggtttaagtgatttttttgttttagttttttgagtagttgggattataggtatgtgttattatgtttggttagta

SEQ ID NO: 14981 - DNA, 201 bp, Artificial Sequence
  Description of Artificial Sequence: Synthetic polynucleotide
aattttttttttattttttttgtttttttattttataaaattgttattgttattatggtttatttttaatgagttgttgggtatattttttagatggggttgtggttgggtagaggggttttttattttttagtaggggtggttgggtagaagtgttttttattttttggatggggtggttggttgggtggggggttgatt

SEQ ID NO: 14982 - DNA, 201 bp, Artificial Sequence
  Description of Artificial Sequence: Synthetic polynucleotide
gggggttttttaagtttagttttgggtttgggttggggtatagggtagagtgggtttttttagtttttgttatgaggttaaggtagtgtattgtttgtagtgtatatttagaaattaaagtttaggagttggttattattttggtttatagttgatggaagagtaggtgtttttgagaatttatagtgttttttggttagt

SEQ ID NO: 14983 - DNA, 201 bp, Artificial Sequence
  Description of Artificial Sequence: Synthetic polynucleotide
tgggtagtagagtgagattttgttttaaaaaaaaaaaaaaaaagggggggttgggtgtggtggtttatgtttgtaattttagtattttgggagattgaggtgggtagattatgaggttaggagattgggattattttagttaaaatggtgaaattttgtttttattaaaaatataaaaaattagttgggtgtagtggtggg

SEQ ID NO: 14984 - DNA, 201 bp, Artificial Sequence
  Description of Artificial Sequence: Synthetic polynucleotide
gtgggagttatagggttttaggggaggagtgttttaggttgtggtaatagtaggtgtaaaggttttgaggtaggatggggtagggaggtttagagtttattgtgtagagatttgggaggttggtaggtatggtgaggattttgatttaaatttaggaaaggggaattatattggggtatgattttttgtattttttgagat

SEQ ID NO: 14985 - DNA, 201 bp, Artificial Sequence
  Description of Artificial Sequence: Synthetic polynucleotide
gggatttttttatgttggttaggttggttttgaatttttgattttaagtgatttatttgttttggttttttaaagtgatgggattataggtatgagttattgtgtttggttaagggtttttttagatgtaattaagttaagatgaggttatattgagttaggtgggttttaaatttaatggttagtgtttttataagtata

SEQ ID NO: 14986 - DNA, 211 bp, Artificial Sequence
  Description of Artificial Sequence: Synthetic polynucleotide
gttttagggttggaggagtaggagatttgggtagtggggtgggtgagtgttgggaggaggtaagaggttgtgggggaggaagatgttttttttggttttgtggggtaggttgtgtagggtaggttgtgtggggtaggtggggggtgttaaggaagtttgggtgtggttatattgtagagaaagttatgggaggtatgttttgagagttggg

SEQ ID NO: 14987 - DNA, 201 bp, Artificial Sequence
  Description of Artificial Sequence: Synthetic polynucleotide
gtagttaaagttatttttttggttgaaagatattttttttggggggaggagttaagatggttgagtaggaatagttttggtttatagtttttagtgtgagtgataaagaagatgggtgatttttgtatttgtatttgaggtatttggtttattttattagggagtgttagatagtgggtgtaggttagtgggtgtgtgtat

SEQ ID NO: 14988 - DNA, 201 bp, Artificial Sequence
  Description of Artificial Sequence: Synthetic polynucleotide
gtttaggatttgtagtttattatgtttgagttttttatttattttatgggtttttgtgttgtttaagttttttggatgagtgttattttttgttttatggtgtttagttttattgattatttaagggttgaggaatgtgagtatatggtgtaggattggtaggtagttttatttgtagttttggtgtgggatttattaggt

SEQ ID NO: 14989 - DNA, 201 bp, Artificial Sequence
  Description of Artificial Sequence: Synthetic polynucleotide
tggtaatattgtgaagatgtaggttttttatgggaaagattgttgtttggaagtttttatataataggtttttattgagattttaaggttgatagtatggtgggagtttttgggatttttgggtttggtatagtgttattgtagtaggtaggtattgggtggttagaagttgattatttttttaaatggtttgtatatatt

SEQ ID NO: 14990 - DNA, 201 bp, Artificial Sequence
  Description of Artificial Sequence: Synthetic polynucleotide
tttttatgggttgatttggtgattttttatggagaatgtgtaggagttggatattggtattgttaggtggaaaagttttttgttagggtgaaaagttagatggtgtttgttttttgtttttggagtgtttttggtttaatgtagtagttttgtagataaatgttatagaaggtagagtgttttatagatatgaaggagtgg

SEQ ID NO: 14991 - DNA, 201 bp, Artificial Sequence
  Description of Artificial Sequence: Synthetic polynucleotide
gatttttggatttgttgggttgtttttgtatttggttttttttttttaagtttgtggttgggtgtggtttttttaattttagtgttgatttttgtgtttgtgtgttttttttttattttttttatttgtggggttaggggttatatggtattgttgtttgggtttttgagtagggagagttgagtgttgattttgttagaa

SEQ ID NO: 14992 - DNA, 201 bp, Artificial Sequence
  Description of Artificial Sequence: Synthetic polynucleotide
ggatattttataaaatttttgatgagttttttttaaaattattaggttggttgggtgtggtggtttatgtttgtaattttagtattttgggaggttgaggtgggtagattataaggttaggagattgagattattttggttaatatggtgaaattttgtttttattaaataatataaaaaattagttgggtgtggtagtgg

SEQ ID NO: 14993 - DNA, 201 bp, Artificial Sequence
  Description of Artificial Sequence: Synthetic polynucleotide
tttttttttatttttttaggggtttgattttttttttaattgtatttttatagaatggttggttagataggaagttttggttggtgaagtttagtttttgtgggtataggttggtgaattttagagatttgggatttgggtaggttttgtatttgattttttatatggttttgatggagtagtagtagatgtttatttggt

SEQ ID NO: 14994 - DNA, 201 bp, Artificial Sequence
  Description of Artificial Sequence: Synthetic polynucleotide
aaattagttaggtttggtggtaggtatttgtaattttagttattttaggggttgaggtaggagaattgtttgaatttgggaggtggaggttgtagtgagttgagattgtgtttttgtattttagtttgggggataagagtgagattttgttttaaaaaaaaaaaaaaaaaaaaaaaaaggttgggtggtttatatttgtaa

SEQ ID NO: 14995 - DNA, 201 bp, Artificial Sequence
  Description of Artificial Sequence: Synthetic polynucleotide
tattgttatgatttgtgagtgtgtgttttttattttgttagagttggtagtgtgtgttatttatttggtgtttggttattattgttttatgtggatggtgtggttggtttttatgtatgtgtttttggtggttgaggttgatgtggatgtgttgttgtttatttttatgtttttgtgtttttatttgttgggttgggtgat

SEQ ID NO: 14996 - DNA, 201 bp, Artificial Sequence
  Description of Artificial Sequence: Synthetic polynucleotide
tttgtggggtttgtttgtttttttagttgttgttttttgggtggtgtttgttggtgttgatttttataatttattttttttagatagagtttttttttgttgtttaggttggagggaagtggtatgattttagtttattgaaatttattttttttgggtttaagtgatttttatttttgtttttggagtagttgggattat

SEQ ID NO: 14997 - DNA, 201 bp, Artificial Sequence
  Description of Artificial Sequence: Synthetic polynucleotide
ttattttagttttttgagtagttgggattataggtttgtgttattatgtttagtttattttttattttattttatttttatttttattttttttttgagatggagttttgttttgttgtttaggttggagtgtagtggtgggattttggtttattgtaagttttgttttttgggtttatgttatttttttgttttagtttt

SEQ ID NO: 14998 - DNA, 201 bp, Artificial Sequence
  Description of Artificial Sequence: Synthetic polynucleotide
aaatggtgatttagaggttgtttttatttgatgggtttttttagttgaagatgtttagttaatgaattttaagtagatttatggttgggtgtgaagttaatggagtttttattttgtggagatgagtagtataaatttttgtttttaatgtttaatgatatgtaaaatatttaaatttgtaatgtagaattattaagttgt

SEQ ID NO: 14999 - DNA, 201 bp, Artificial Sequence
  Description of Artificial Sequence: Synthetic polynucleotide
ggtaggtggattattttagtttaggagtttgagattagtttgggtaatatggtaaaattttatttttataaaaaatataaaaattagttggttatggtgttgtgtatttgtagttttagttattagggagattgaggtgggagggttatttaagtttgggagaggtgggtgtggtggaggttgtagtgagttaagatgtat

SEQ ID NO: 15000 - DNA, 201 bp, Artificial Sequence
  Description of Artificial Sequence: Synthetic polynucleotide
tagattgatagattttttttttttttgagatggagttttgtattgttatttgggttggagtgtagtggtgtaattttggtttattgtaatttttttaatttgtgtttaagtaatttttttgttttagttttttgagtagttgggattatagggtgtgttattatgtttggttaattttttgtatttttagtagagatgggg

SEQ ID NO: 15001 - DNA, 201 bp, Artificial Sequence
  Description of Artificial Sequence: Synthetic polynucleotide
ttttgggtggtaaggattttatggtgttggtatatgtgttgtgtatgttggtattgggtttgggtattttattgtagtttatggttgtagataagggtattgggtgtggtttagtgggaggattttagtaaggagttggggaaatatgtatgtgtttatttagggttggagtttattgaaggtttatgtgggtagtatgtg

SEQ ID NO: 15002 - DNA, 201 bp, Artificial Sequence
  Description of Artificial Sequence: Synthetic polynucleotide
tggtttattgtaatttttattttttgggtttaagtgatttttttgttttagttttttgagtagttaggattataggtatgtattattatttttggttaattgttgaatttttagtagagatggggttttattatgtttgtaaggttggttttgaatttttgattttaggtgatgtttttatgttggttttttaaagtgtta

SEQ ID NO: 15003 - DNA, 201 bp, Artificial Sequence
  Description of Artificial Sequence: Synthetic polynucleotide
tggttttttaaagtgttgagattataggtgtgagttattgtgtttggtttattttaggtgatttattttttttagttttttaaagtgttgagattataggtgtgagttattatgttgggtttattttaggtgatttattttttttggttttttaaagtgttgagattataggtgtgagttattgtgtttggtttattttag

SEQ ID NO: 15004 - DNA, 201 bp, Artificial Sequence
  Description of Artificial Sequence: Synthetic polynucleotide
gatttgagaattgtttgtattagtttggttttttgtatagtgtttgtgttggtgtatattttagaggggagttgtgttattagatgaattaggattttggtggaggaagggggtgttggtagggtttttatggtatttgttgtttgtggttgaggggagtttggaagggtattagttttatttatttttggttgagatttt

SEQ ID NO: 15005 - DNA, 201 bp, Artificial Sequence
  Description of Artificial Sequence: Synthetic polynucleotide
tttggtatatttagagtatattggggttggggtagatggtggtatttgttttggttggaggagttgggagggttggggaagggatgtgtgattttttttttgataaatttggatgagatgttaagtataatatagaggttggtggtggggtttttttttgtttttggtggattaatttattgtgggattttgggtaatttt

SEQ ID NO: 15006 - DNA, 201 bp, Artificial Sequence
  Description of Artificial Sequence: Synthetic polynucleotide
ttaaaaaatatatatggttgggtgtggtggtttatgtttgtaattttagtattttgggaggttgaggtgggtggattatgaggttaggagattgagattatggtgaaattttgtttttattaaaaaaatataaaaaattagttgggtgtagtggtgggtgtttgtagttttagttgtttgggaggttgaggtaggagaatg

SEQ ID NO: 15007 - DNA, 201 bp, Artificial Sequence
  Description of Artificial Sequence: Synthetic polynucleotide
atggttatatggtagggtttttgttgtttttattgttgttagtttagttgtttgttattttttttagtggtgtttttgttattaatgggttttttataattgatttggtttatgggttgtagatgttgtggattattggtgtggggaagtatgagtttattgatttggggtattttagaggtaagttttgttgttatgtgt

SEQ ID NO: 15008 - DNA, 279 bp, Artificial Sequence
  Description of Artificial Sequence: Synthetic polynucleotide
gggtttgggtttgttaggtgtagaataaggagaaaggggtagaggggaagagttgggttgaattttagtgagggatttggttttttttggaggagaggattgtatttgtgttaggagtatggatttatttagggagtgtttgggtggagaagtagtttttgttttaggttttttgttgtggtatttaaagaggttgggtggtttagaggtttgtaagttatgtttttttttaggttttgtttttgtttggttattttttttgttgttagtttttttatt

SEQ ID NO: 15009 - DNA, 201 bp, Artificial Sequence
  Description of Artificial Sequence: Synthetic polynucleotide
ttggttgttatgaaattataaattatgtttatagaaattttagtttgagaaagaatttagatttttttttttttttttttttttttttgagattgagttttgttttgttgtttaggttggagtgtagtgatgttattttggtttattgtgagttttgttttttgggtttatgttattttttggttttagttttttgtgtag

SEQ ID NO: 15010 - DNA, 201 bp, Artificial Sequence
  Description of Artificial Sequence: Synthetic polynucleotide
ttgggggtggggtggggtggggtggggtggggtgggggggtggggttgaggtaggagaatggtgtgaatttgggaggtggagtttgtagttagttgagattgtgttattgtattttaatttgggtgatagtgattttattttaaaaaataataataataaaaaagaataaagattttataggtattttttttatagtagag

SEQ ID NO: 15011 - DNA, 201 bp, Artificial Sequence
  Description of Artificial Sequence: Synthetic polynucleotide
ggggttttattgtgttagttaggatggttttggttttttgatgttgtgatttttttatttaggttttttaaagtgttgggattataggtgtgagttattgtgtttggtttagttttttatttttaataagtttttaggtgatgtttatgttggtagttttttgagattattatattttaagttttagggtgttagaaaaac

SEQ ID NO: 15012 - DNA, 201 bp, Artificial Sequence
  Description of Artificial Sequence: Synthetic polynucleotide
tgttgttgttgtttttaagttggagttttgttttgttatttaggttgtagtgtagtggtatgattttggtttattataattttggttttttgggttttagtgatttttttgttttagttatttaagtagttgggtttataggtgtatgttattatgtttggttaatttttgtatttttaggagagataggtttttattatg

SEQ ID NO: 15013 - DNA, 201 bp, Artificial Sequence
  Description of Artificial Sequence: Synthetic polynucleotide
aattgagttgtggaatggggttttgtggagtaggttgagtgtgttggttgtggatgggttgtgggtgggattttttagtgtgttattattgaggtatttttgtttttttatgtgtttttgtttttttttttagaagtttaatatttttgagaggatttaaaatatagagtgattagtttttatgtgtattttttggataaa

SEQ ID NO: 15014 - DNA, 201 bp, Artificial Sequence
  Description of Artificial Sequence: Synthetic polynucleotide
aggggagatgaagaaggagggggtagtttgtttaggaggttaggggggtatttgtgtttggtttaggtttattgatgtagatattattgatatttatgtttgtgttgtgttttttgtggtgtttgtggttgttaatgttatttattgggtggtatatgttatgtgagtataggatttaggttatttttgtttgttttggtg

SEQ ID NO: 15015 - DNA, 201 bp, Artificial Sequence
  Description of Artificial Sequence: Synthetic polynucleotide
ttatatattttatgtgttttgtttattatgaggtttgtattttttgggtagtaggtgttgtgtgtttttgggtattttgtaggtggagttgttggtgtagtgtagtattttgtgtttttgatgttggttttggatttagttgttgttgtatttgttattgtttttgggggatatatgtatggagtttatttttaatagggg

SEQ ID NO: 15016 - DNA, 201 bp, Artificial Sequence
  Description of Artificial Sequence: Synthetic polynucleotide
tttattataaatataaaaaattagttgggtgtggtggtgggtatttgtagttttagttatttggaaggttgaggtaggaaaatgatgtgaatttgggaggtggagtttgtagtgagttgagattgtgttgttgtatttaagtttgggtgatagagtgagattttgggttaaaaaaaataaaagaatatagggtatggtatt

SEQ ID NO: 15017 - DNA, 201 bp, Artificial Sequence
  Description of Artificial Sequence: Synthetic polynucleotide
tagagtagttgggattataggtgtttattgttatgtttggtttatttttttttgtatttttagtagagatggggttttattgtgttagttaggatggttttgattttttgatgtgatttatttgttttggttttttaaagtgttgggattataggtgtgagttattgtgtttggtttatttatgtgttttttgggaagggg

SEQ ID NO: 15018 - DNA, 201 bp, Artificial Sequence
  Description of Artificial Sequence: Synthetic polynucleotide
aggtgtttgttattatgtttggttaattttttgtatttttagtagagatggggttttattatgttagttaggatggttttgattttttgattttgtgatttgtttattttgtttttttaaagtgttgggattataggtgtgagttattgtgtttggttgttttttggtatattttttatttttagtatgtggtttttatat

SEQ ID NO: 15019 - DNA, 203 bp, Artificial Sequence
  Description of Artificial Sequence: Synthetic polynucleotide
gttggttatggaaggttatagttttgtagatggtgttggtggagtttggggtagggtattttgagtttgggaaggtttggggtgaaggtttggaggttggtgtgtaggaggttaaagtagtagggaggtttggggagagttaggtggggttgtgttttttatgttgtaggttgtgtttatagatggtgaaagatgttgtggaa

SEQ ID NO: 15020 - DNA, 201 bp, Artificial Sequence
  Description of Artificial Sequence: Synthetic polynucleotide
ttttaagtagttgggattataggtgtttattattatgtttggttaatgtttttgtttttttagtagagatggggttttattgtgttagttaggatggttttgattttttgattttgtgatttttttgttttggttttttaaagtgttgggattatagtaattatttgatggtgtgagttattgtgtttggttatgtatgat

SEQ ID NO: 15021 - DNA, 201 bp, Artificial Sequence
  Description of Artificial Sequence: Synthetic polynucleotide
tttatttttgtgaaaatttttgtgtttgaaaattattgtaaaatatttggaattattattattatttatttttattttttgagatggagttttgttttgttgtttaggttggagtgtagtggtgtgattttggtttattgtaagttttgttttttgggtttatgttatttttttgttttagttttttgagtagttgggatt

SEQ ID NO: 15022 - DNA, 201 bp, Artificial Sequence
  Description of Artificial Sequence: Synthetic polynucleotide
ttggtgagagataaggtatttagggaaagaagaaaaaagtttaggaagggattttagtttgttagatttggggtagaagttttttttggatgagtttttatggagaaatttaaatattaggggttttggaaggttggaagtttttaagttgtttaggaaaagattaaagagatataaattataaaagttttgggattttta

SEQ ID NO: 15023 - DNA, 201 bp, Artificial Sequence
  Description of Artificial Sequence: Synthetic polynucleotide
gttattgattttgagtttttgtttttttatttataaaattgagattagggttgggtatggtggtttatttttgtaattttaatattttgggaggttgaggtgggtggattatgaggtgaggagtttgagattagtttgattaatatggtgaaattttgtttttattaaaaatataaaaattagttgggtgtggtggtgtgt

SEQ ID NO: 15024 - DNA, 201 bp, Artificial Sequence
  Description of Artificial Sequence: Synthetic polynucleotide
gtatgtttattgtagaattatttataatagtaaagatatggatagattggattaagaaaatgtggtgtatatatatatatgttatggaatattatgtagttgtaaaaagaataaaatttggttttttgtagtaatatggatgtagttggaggttattatttggagtgaattaatataggaatagaaaattaaatattgttt

SEQ ID NO: 15025 - DNA, 201 bp, Artificial Sequence
  Description of Artificial Sequence: Synthetic polynucleotide
ttttagttttgtgattggttttttgttttgtgttgatatttagtattttttttggtttttgttttgaggggaaaataaaataggggtttttaggttttattgttggtttattttattgtagtaaattgattgagggttttttgttgtgtttttgtggtttgttgttttatttagtggttttgatatttggtatttatttaa

SEQ ID NO: 15026 - DNA, 201 bp, Artificial Sequence
  Description of Artificial Sequence: Synthetic polynucleotide
gtgggtggattatgaggttagtagattgagattattttggttaatatggtgaaatttagtttttattaaaaatataaaaaattagttgggtgtggtggtatgtgattgtagttttatttattggggaggttgaggtaggagaattgtttgaatttgggaggtggaagttgtagtgagttgagattgtgttattgtattttc

SEQ ID NO: 15027 - DNA, 201 bp, Artificial Sequence
  Description of Artificial Sequence: Synthetic polynucleotide
ttttattttttagttagttttttgtgtagtgtttagggttttggtagttaggatagagtgagtaaaagaagatggatagtggatagggtgtagtggtttatgtttgtaattttagtgttttgggagagtgaggtgggtagattataaggttaagagattaagattattttggttaatatggtgaaattttgtttttattaa

SEQ ID NO: 15028 - DNA, 201 bp, Artificial Sequence
  Description of Artificial Sequence: Synthetic polynucleotide
aaggtaggtggattatggggttaggagtttgagattagtttggttaatttggtgaaaatttgtttttattaaagatataaaaattagttgagtgttgtggtgtatgtttgtaattttagttattggggaggttgaggtaagagaattatttgtaattgggaggtggaggatgtagttagtgagatggtgttattgtatttt

SEQ ID NO: 15029 - DNA, 201 bp, Artificial Sequence
  Description of Artificial Sequence: Synthetic polynucleotide
atttagggggttgaggtaggagaattgtttgaatttgggaggtggagtttgtagtgagttgagattgagttattgtatattttagtttgggtaataagagtgagatttagttttagaaaaaataaataaataataaaataaaaagtaggttgggtgtgatggtttatatttataatattagtattttgggaggttgaggtg

SEQ ID NO: 15030 - DNA, 3238 bp, Artificial Sequence
  Description of Artificial Sequence: Synthetic polynucleotide
tagaatgttaggtgtgaaaggtgatgttgaggtagtatgagggaaaaagtagtaggtagtgattgttatatggatgatagtgtttttttggtagtttttgtgttagatttggggttgttgtggagtttttgatttgaatttagggtgtgtgttgtgtttatggggggatattttaaagtggtaagaatgttttttgggaagggaataggatgttaggtttgaaaggggattttgaagtagtttaggaaaaaattttttatggattatggtgtttttttggtagtttttttgttaggtttgagggggttgttgtgttttaggtttgtatttagggttttatggggggtattttaaagtggtaagtaggtttttaggggaaggggatagtatgttaggtttggagggggatgttgaggtagttttgggaataaagaggggatgttggggttttgttatggataatattgtttttttgatagtatttgtggtgggtttgggagtgttatggagtttttggtttgtatttaaggtgtgtgttttgtttttggggggtattataaagtggtaagaaggttattgggggaagggtatgggatgttagggttgaaagggatagttgaggtagtttggggaaaaatgtggtaggttggggttgttttatggatgatagtgtttttttagtagtttttgtgttaggtttggggtggttgtggagtttttggtttgtattgagggtgtgggttgtatttatgggggtattttaaagtggtaagaaggttgttgggtgaatgttatagaaggttaggttttaatggggatgttgaggtagtatagagagaaaagtggttagttgggttttttttatggatgatagtgtttttttggtagtttttgtgttgggtttggggggattgtggagtttttattttgtatttagggtgtgtgttttgtttatgggaggtattttaaagtggtaagtaggtttttgggggaaggggatagtattttagatttgaagggggattttgaggtagtttgtggaaaaaaatggtgatgttgagttttttttataaatgatagtgtttttttggtagtttttttgttgggttagggtggttttggagtttgtggtttgtatttagggtgtgtgttttgtttaagggggtattttaaagtggtaagtagatttttgggggaagggagagtatgttaggtttgaaggggaggttgaggtggttttggggtaaaagtggtgaagttggggtttttttatggatgatattgtttttttggtagtttttgtagtgggtttagaggtgttgtggagtttttggtttgtttttaggttgtgtgttttgtttatgagtggtattataaagtagtaagaaggtttttaggggaagggtataggattttagggttgaaaggtagagttgaggtagattggtgttattttaaggataatagtgttttgtttggtagtttttgtattgggtttggggtggttgtggagtttttggtttgtatttggggtgtgtgttgtgtttatgatgggtattgtaatgtggtaagaagtttttgagtggaagggaataggatgttgagtttgaaaggggatgttgaggtagtttggggaaaaaatttttattgagaatagtgtttttttggtagtttttgagtgggatttaggtggatggtggagtttttggtttggatttagggtgtttgttttgtttatggggtgtatgtgaaagtggtaatagggtttttgggggaaggggataatatgttaggtttgaagagggatgttgggttagttagaggaaaatagtggttaggttgtggttgttttatagattatagtgtttttttggtagtttttgagtttggtttaggtgggggggtttggagtttttgttttgtaatagagtgtgtgttttgtttaagtgtgtatgtgaaagttgtaagaagggttttgggggaagggaataggatgttaggtttgaaaggggattttgaggtagtttagggaaaaattttttatggaggatagtgattttttgatattttttgtgtttggttttgggggttttggagtttttggtttatatttagggtgtgtgttttgtttatgggtggtattttaaagtagtaagaaagttttggggggggaagaataggatgttagatttgaaaggggatgttgaggtagtttaggaaaaaaaggggtgaggttggggtttttttatggatgatagtgttttttttatagtttttatgttagttttgggagggttgtggagtttttgttttgtatataatgtgtgtgttttgtttatggggggtattttaaagtggtaagaagttttttgtgggaaggtaataggatgttaggtttgaatggggatgtttaggtagtttggagaaaaaagtagtgaggttggggtgattttatgaatgatagtgttttattggtagtttttttgttgggtatgtgggggttgttgattttttggtttgtatttagggtgagtgttttgtttatggtgggtattataaagtagtaagaaggtttttgggggaaagggatagtatgttagttttgaagggggaagttgaggtagttttggggaaaaaaagtggggatgttggggtttttttatggatgatattgtttttttagtagtttttgtagtgggtttgggagtgttttggagtttttgttttgtattttgggtgtgtgttttatttatggggagtattataaagtggtaagaaggttattgggggaagggtataggatgttagggttgaaggggatagtggagatagtttaaggaaaaaagtggtgggatggtgttgttttaaggatggttatttttgtgttgggttagggatggttgtggagtttttggtttgtatttaggttgtgtgttttgtttatagggggtattttaaagtagtatgaaggtttttaggggaagggaagaggatgttaggtttggaaggtgatgttgaggtagtagggggtaaaaagtggtgggttgggtttttttatggatgatagtgtttttttggaagttgttgtgtagggtttggtgtgtttgtggagtttttggtttgtatttagaattgtgtggtgtttatgatgggtattttaaagtggtaagatattttttgttggaagggaataggatgttaggtttgaaaggagaagttgagttagtttggggaaaaa

SEQ ID NO: 15031 - DNA, 201 bp, Artificial Sequence
  Description of Artificial Sequence: Synthetic polynucleotide
ttaaggttattattttaaagtgttttagaaaataatatatagaaggttgggtgtggtggtttatgtttgtaattttagtattttgggaggttgaggggggtggattatgaggttaggagattgagattattttggttaatatggtgaaattttgtttttattaaaaatatatatatataaaattagttgggtgaggtggta

SEQ ID NO: 15032 - DNA, 201 bp, Artificial Sequence
  Description of Artificial Sequence: Synthetic polynucleotide
ttattatttatttattattttgtttgtaatttgggttattatttattagtaatttgatgattaatatgttttattttagtaggtgtgtaaggtgtgggggtggatataaagattgtggtttttggagaggatggttagggggttgtttttgtaagtgttttttaaaataattggttattgtttttgagtgtttgggtgttg

SEQ ID NO: 15033 - DNA, 201 bp, Artificial Sequence
  Description of Artificial Sequence: Synthetic polynucleotide
atggtgattagaaatgtattaaattttgaatgtataaaagagagagttttaatatgaaatagtaattttttgagaatgaagattttgtagtgttggtgtttgttgggttgtgtaggttttggttgttttatgtttgtgtttgtttttattgtgatttttttgtttttggtatgtttagggttaatttttgggtttattgta

SEQ ID NO: 15034 - DNA, 201 bp, Artificial Sequence
  Description of Artificial Sequence: Synthetic polynucleotide
tttggggattattttgtttttttgttttgattttttttttttttttttttttttttttgagatggagttttgttttgttgtttaggttggagtgtagtggtgtgattttggtttattgtaagttttattttttgggtttatattatttttttgttttagttttttgagtagttgggattataagtatttgttattatgttc

SEQ ID NO: 15035 - DNA, 201 bp, Artificial Sequence
  Description of Artificial Sequence: Synthetic polynucleotide
tttttgggatggggggatttttaggtatttttgggttttgagttgggttgttagggttgtttgttttttgttgttttttttgggttgagttttgtttttgtgttttgtagtggagtagttgtttttaaaggtgtatgtgattagggtgtggttgggatagtgggtatttttttgggttttagtgttgtgtgtgttttggtc

SEQ ID NO: 15036 - DNA, 201 bp, Artificial Sequence
  Description of Artificial Sequence: Synthetic polynucleotide
tggtgtttggtatgaaattttttttttttttttgagatagagttttgtttttgtgtttaatttggagtgaagtggtatgattttggtttatggtaatttttgttttgtaggattaagttattattttgatttagttttttgagtagttgggattataggtatttattattatggttggttaatttttgttttttgtttttt

SEQ ID NO: 15037 - DNA, 201 bp, Artificial Sequence
  Description of Artificial Sequence: Synthetic polynucleotide
aagtagttttttaaaattttaaaaagtaagtatagttttaggaaggagggaggttagtgaaattaaatttttgttgataagtttaaagtaattggtaagatgttgggaaattagatattgaaatatttgtttttaatttttaatttgttattatttgaaataaagttattagggatagttgggtgtggtggtttatgtttg

SEQ ID NO: 15038 - DNA, 201 bp, Artificial Sequence
  Description of Artificial Sequence: Synthetic polynucleotide
atttattgaagaagttgaagtgtgaagtgtgaaattgaagaattttgaaatgtattgagtagtgaaaagattatgtatataaaaataggttggttgggtgtggaggtaggtagattatttgaggttaggaggtgtgattttggtttattgtaagttttattttttgtgtttatgttatttttttgttttagtttttggagt

SEQ ID NO: 15039 - DNA, 201 bp, Artificial Sequence
  Description of Artificial Sequence: Synthetic polynucleotide
attttgggaggttaaggtaggtggttgggaggtgtaggttgtagtgagttgagattatgttattgtattttagtttgggtattattgagtattgagtgaatgagattttgtttgtaattttggtattttgggaggttgaggttggtggattatttgtggttaggggttggagattggtttggttaatatagtgaaattttg

SEQ ID NO: 15040 - DNA, 201 bp, Artificial Sequence
  Description of Artificial Sequence: Synthetic polynucleotide
gtggtgtaattttggtttattgtaagttttgttttttaggtttatgttatttttttgttttagttttttgagtagttggtattataggtgttgattattatgtttggttaattttttgtattttttgatagagatggggttttattgtgttatttaggatggttttgatattttgattttgtgatttgtttgttttggttt

SEQ ID NO: 15041 - DNA, 201 bp, Artificial Sequence
  Description of Artificial Sequence: Synthetic polynucleotide
ggtgggygggttaygaggttaggatatygagattattttggttaatayggtgaaatttygtttttattaaaaatatagaaaattagtygggtatgttggygggtatttgtaagttttagttattygggaggttgaggtaggagaatggygtgatttygggaggyggagtttgtagtgagtygagattaygttattgtattt

SEQ ID NO: 15042 - DNA, 208 bp, Artificial Sequence
  Description of Artificial Sequence: Synthetic polynucleotide
tttatttatttatttttgagatagagtttygttttgtygtttaggttggagtgtagtggtgtgatttyggtttattgtaagtttygtttttygggtttaygttattyggttttagtttttygagtagttgggattataggygttygttattaygttyggttaattttttatatttttagtagagatagggttttattatgttagttag

SEQ ID NO: 15043 - DNA, 201 bp, Artificial Sequence
  Description of Artificial Sequence: Synthetic polynucleotide
ttttttttttttttttttttttttttgagayggagtttggttttgttgtttaggttggygtgtagtggtttattgtatttttygtttttygggtttaagygatttttttattttagttttttaagtagttggggttaaaggtttgtgttattatgttyggttaattttttgtattttagtagagayggggttttatygtgt

SEQ ID NO: 15044 - DNA, 201 bp, Artificial Sequence
  Description of Artificial Sequence: Synthetic polynucleotide
tygtggtgtaattttagtttattgtaatttttgtyggtagggtttaagtaatttttttgttttagtttttygagtagttgggattataggtaygtattaygatgttyggttaatttttgtatttttagtagagatggggttttattatgttgattaggttggttttgaatttttgattttaggtgattygtttatttyggt

SEQ ID NO: 15045 - DNA, 201 bp, Artificial Sequence
  Description of Artificial Sequence: Synthetic polynucleotide
gtgggttttaaatattttataagttagagtaattagaatagtatggtattggtataaagataggtatatagtttgttyggtttygtttygttttgtygtygygtttgttagttatgagttttatgtagttaaataaaggtttttttgtggatttttggttgaggttaagaatyggtttttgtttaaatatgatttttagaa

SEQ ID NO: 15046 - DNA, 201 bp, Artificial Sequence
  Description of Artificial Sequence: Synthetic polynucleotide
tattgatttggaagaayggaatgatagttagtgaggtatatttagtaatygagtayggttagtgtyggttttyggttttygagatattgatttaygtagygttaggattyggggattttttaggtgtaaattagaggttaaatagtttgtttggttaatgggttagaatttgtggttgaatagaggttttgttgtggtttt

SEQ ID NO: 15047 - DNA, 201 bp, Artificial Sequence
  Description of Artificial Sequence: Synthetic polynucleotide
ttatttttgggggatgagaggagggatggtgagaggatatttttaaagaatatttggggtyggggaagaattttttatgatttygttttataatttggtygtttattttgtattttgttgtaygttgttyggtttttggttatgttatgtgaatttttggagttattttttttttttttttatttggatggagagggtttt

SEQ ID NO: 15048 - DNA, 201 bp, Artificial Sequence
  Description of Artificial Sequence: Synthetic polynucleotide
tttaatagatatgaaaattgaaggtygggygtagtggtttaagtttgtaattttagtattttgggaggtygaggygggyggattaygaggttaggagatygagattattttggttaatatagtgaaatttygtttttattaaaaatattaaaaattagtygggygtggtggygggygtttgtagttttagttatttgggag

SEQ ID NO: 15049 - DNA, 201 bp, Artificial Sequence
  Description of Artificial Sequence: Synthetic polynucleotide
ttgaatagttgggattataggygtttgttatygygttyggtttattttttgtgtgtttttagtagagayggggttttatygtgttagttaggatggtttygattttttgatttygtgattygttygtttyggttttttaaagtgttgggattataggtttgagttatygygttyggttaaaataattaatttttgtgttaa

SEQ ID NO: 15050 - DNA, 201 bp, Artificial Sequence
  Description of Artificial Sequence: Synthetic polynucleotide
ayggatttttgyggtgagtgttatagtttttaaaggtggygtgttyggagtttgttttttttgatgttyggatgtgttyggagttttttttggtgggttygtggttttgtyggtttaggagtgaatttgtagatttttgyggtgagtgttatagtttataaaggtagtgtggatttatagagtgaatagtagtaagattta

SEQ ID NO: 15051 - DNA, 201 bp, Artificial Sequence
  Description of Artificial Sequence: Synthetic polynucleotide
tattaaaaataaagaaggaggtygggygyggtggtttaygtttgtaattttagtattttgggaggtygaggtgggyggyggattaygaggttaggagatygagattayggtgaaatttygtttttattaaaaatataaaaaattagtygggygyggtggygggygtttgtagttttagttattgggaaggttgaggtagga

SEQ ID NO: 15052 - DNA, 201 bp, Artificial Sequence
  Description of Artificial Sequence: Synthetic polynucleotide
gttaagatagygttattgtattttagtttgggaatagagygagatttygttttaaaaaaaaattattgatatatataaatatttgtgaaattggttgggygyggtggtttaygtttgtaattttagtattttggggggtygaggygggygtattataaggttaggagatygagattattttggttaatayggtgaaatttt

SEQ ID NO: 15053 - DNA, 235 bp, Artificial Sequence
  Description of Artificial Sequence: Synthetic polynucleotide
gtttatagtttttagagagagygaygtagaagatgggtgatttttgtatttttatttgaggtatygggtttattttattagggagtgttagatagtgggygtaggttagtgggtgygygtattttgygtgagtygaagtagggygaggtattgttttatttyggaagtataaggggttagggagtttttttttttagttaaagaaaggggtgatagayggtatttggaaaattgg

SEQ ID NO: 15054 - DNA, 201 bp, Artificial Sequence
  Description of Artificial Sequence: Synthetic polynucleotide
tttygagtagttggygttataggygtttattattaygttyggttaattttttgtatttttagtagagatagggttttattatgttagttaggatggtttygattttttgatttygtgattygttygttttggttttttaaagtgttgggattataggtatgagttatygyggtyggttttaattatgtatttttatttatt

SEQ ID NO: 15055 - DNA, 201 bp, Artificial Sequence
  Description of Artificial Sequence: Synthetic polynucleotide
ttgattatttaggtgygtttgttatttttttttttgattyggaaagggaattttttgtttttttgygttttttaagtgaggtaatgtttygttttgtttyggtttgygtatggtgtaygtatttattgattygygtttattgtttggtattttttagtgagatgaattyggtattttagatggaaatgtagaaattatttg

SEQ ID NO: 15056 - DNA, 201 bp, Artificial Sequence
  Description of Artificial Sequence: Synthetic polynucleotide
tgggtygttgggtgttygggttgtttttttattgtttaggataaattttatttygttttatyggtygatggtttgtyggggagttygygggygagtyggygtttgtaggtgtgtttttttgttgatatgtttttygtgattagtygtttttgtttttttttattgatgygtttttttygttttttagtagtttttgttttt

SEQ ID NO: 15057 - DNA, 201 bp, Artificial Sequence
  Description of Artificial Sequence: Synthetic polynucleotide
tatttggttyggagggttttatgtttatygagttttgttgattgttagtatagtagtttgagattaaattgtaaggtagtagygaggttgggggaggggygttygttattgtttaggttygtttaggtaaataaagtagtygggaagttygaattgggtggagtttattatagtttaaggaggtttgtttgtttttgtagg

SEQ ID NO: 15058 - DNA, 201 bp, Artificial Sequence
  Description of Artificial Sequence: Synthetic polynucleotide
tygttttgtagtttgattttagattgttgtgttagtaattagygagattttgtgggygtaggattttttgagttaggtgtyggatataatttttaggtgygtygttttttaagttygtyggaaaagygtagtattttggtgggagtgattygattttttaggtgttttttgttatttttttttttgattaggaaagggaat

SEQ ID NO: 15059 - DNA, 201 bp, Artificial Sequence
  Description of Artificial Sequence: Synthetic polynucleotide
agygaygtagaagaygggtgatttttgtatttttatttgaggtatygggtttattttattaagggagtgttagatagtgggygtaggttagtgggtgygygtatygtgygygagtygaagtagggygaggtattgttttatttgggaagtataaggggttagggagtttttttttygagttaaagaaaggggtgayggayg

SEQ ID NO: 15060 - DNA, 201 bp, Artificial Sequence
  Description of Artificial Sequence: Synthetic polynucleotide
tattaggatattttggttgtagagaggagttatttatygygagttttttttgagttgttttattatttagtaaagtttttttttattttgtttatttttygtttgtttaygtaygttattgttttygggygttgaatttgttaaatggtggaggtgaaagagttttaatataaatagagttgaaataygttttttgtttgt

SEQ ID NO: 15061 - DNA, 201 bp, Artificial Sequence
  Description of Artificial Sequence: Synthetic polynucleotide
gttggagtgtaatggtatgattttggtttattgtaatatttgtttttygggatttagtaatttttttgttttagtttttygagtagttgagattataggygattattattaygttyggttgatatttgtatttttagtagagayggggttttattatgttggttaggttggtttygaatttttgattttaggtgatttgtt

SEQ ID NO: 15062 - DNA, 201 bp, Artificial Sequence
  Description of Artificial Sequence: Synthetic polynucleotide
tattgttggtattagtatttggaagaggggaatatygtggtttttgaaaatttggagtygttagtaattgaggagttttaaggagtgagaygggggtgtygttttattatttttttatttttgtagtyggtagttttgttagyggtgggggtygggttgaggggtggtggtatattaggggggtggtggtatatattatag

SEQ ID NO: 15063 - DNA, 201 bp, Artificial Sequence
  Description of Artificial Sequence: Synthetic polynucleotide
gtttttyggtattattagtatttgggttttttggagyggaagtggttggtyggggatatgtagtttatagaggtttagatgaaaatttggttttaaaatygttagatgaaataygaayggtaaatgtaggatttatagttgaatagtttttttttggggtttttttaygygttygggttttttatttatygttttttggtt

SEQ ID NO: 15064 - DNA, 207 bp, Artificial Sequence
  Description of Artificial Sequence: Synthetic polynucleotide
attagagtagaggggtttttttattttttgtttagttttttgatttggttttttattttttaggaaatatatttyggttygaggtttatttgttgtygtygtygtyggaggagttggttttgaaygagttggtgaygttgaygtgtttggtaygtggttttagttttaaggatgtgttggttygttggttgtaggggttataggagt

SEQ ID NO: 15065 - DNA, 201 bp, Artificial Sequence
  Description of Artificial Sequence: Synthetic polynucleotide
atattaggggaagaagatataagygttggttatttataggagtattttagtagaaggataygttgataggtattyggaagttagtaggtygtggattagygggaggaggyggaggttggtttgggtagttaggggagagtyggggttgtygagtattttaattttaggggaaaattattttttttttggttgttttatggg

SEQ ID NO: 15066 - DNA, 201 bp, Artificial Sequence
  Description of Artificial Sequence: Synthetic polynucleotide
tygattttttaggtgygttygttatttttttttttgattyggaaagggaattttttgattttttgygttttttaagtgaggtagtgtttygttttgtttygygtayggtgtaygtatttattgatttgygtttattgtttggtattttttagtgagatgaaatyggtattttagatggaaatgtagaaattattygttttt

SEQ ID NO: 15067 - DNA, 201 bp, Artificial Sequence
  Description of Artificial Sequence: Synthetic polynucleotide
ttaygttttaggtatatygatattttygtattggttttttttaggaggttaygttttaggtataygggtatttttatattgattttttttagtaggttaygttttaggtataygggtatttttatattgatttttttygggaggttaygttttaggtataygggtatttttatattggttttttttaggaggttaygtttt

SEQ ID NO: 15068 - DNA, 201 bp, Artificial Sequence
  Description of Artificial Sequence: Synthetic polynucleotide
gtttttttgttyggtygtttagtttgggaagtgaggagygtttttttttggtygttatttygtttaggaagtgaggagygtttttgttyggttatttatygtttgggatgtggggagtatttttgttaggtygygattttatttgggaattgaggagtgtttttgtttygttattattttatttgggaggtgaggagygtt

SEQ ID NO: 15069 - DNA, 201 bp, Artificial Sequence
  Description of Artificial Sequence: Synthetic polynucleotide
gagggagaygyggggygggaattggggttgttygyggtaggttagagtaagttttgggtggatatggttttggygggttttatatttygagtagttggtygttttattagtttygggtagtgaggggtttattattygggatagtagttgtggagggtgygtygagttttttagtagtgttagttygtyggygttgtgttc

SEQ ID NO: 15070 - DNA, 201 bp, Artificial Sequence
  Description of Artificial Sequence: Synthetic polynucleotide
tttgattaaaaataaataaatatggtygggtgyggtggtttaggtttgtaattttagtatttygggaggtygaggyggtggattataaygttaggagatygagattattttggttaatayggtgaaattttatttttattgaaaatataaaaaattagtygggygtggtggtgggtatttgtagttttagttatttaggag

SEQ ID NO: 15071 - DNA, 201 bp, Artificial Sequence
  Description of Artificial Sequence: Synthetic polynucleotide
yggttagggggtatttttagaygtatagaagtttyggaggttatggtaagtttgtaatygggattygtttttaggtttataygtgtagttttttagttgygtaatttttttaaatggagtagttttggygtgggtggggttygggtyggtagtgggggyggggtyggtagtgggggyggggttagttgggggaggaggggg

SEQ ID NO: 15072 - DNA, 201 bp, Artificial Sequence
  Description of Artificial Sequence: Synthetic polynucleotide
tatggygaaattttatttttattaaaaatataaaaattagttgggygtggtagtgtaygtttgtaattttagttatttgggaggttgaggtaggattatygtttgaattyggaaggtggaggttgtagtgaattaagagagyggttttgtattatagtttgaaygatagagtaagattttattttaaaataattaattaat

SEQ ID NO: 15073 - DNA, 201 bp, Artificial Sequence
  Description of Artificial Sequence: Synthetic polynucleotide
attaygttyggttaattttttttttttgtatttttagtagagayggggttttatygtgttagttaggatggtttygattttttgattttataattygttygtttyggttttttaaagtgttgggatgataggtgggagttatygygttyggtttaatttagygttygatatttgaagaygatttgggttagaggagatygt

SEQ ID NO: 15074 - DNA, 201 bp, Artificial Sequence
  Description of Artificial Sequence: Synthetic polynucleotide
agygagtygtygatgttagygagatgttaggttggatttagtaagtygtygatgttagttagaygtagagtagagaaygttggttaaagagtagttaggyggtgtttgttyggtygaagtttagtttyggagaggtaggttttgtattaggaygtggaggtttyggggttatgaaatttttagggtgagagataaaggtag

SEQ ID NO: 15075 - DNA, 380 bp, Artificial Sequence
  Description of Artificial Sequence: Synthetic polynucleotide
tttttttttttttttttagayggagtttagttttgtttttatgttgtagggtagtggygyggtttyggtttattgtaattttygtttttygggttttygygatttttttgttttagtttttygagtagttgggattataggtataygttattaygtttagttaatttttgtttgtttgtttatttatttattattatttttgagayggagtttygttttgttattaggttggagtgttattggagtgtaatggtaygatttyggtttattgtaattttygtttttygggtttaagtaatttttttgttttagtttttygtgtaattgggattataggtaygtgttattatttttagttaattttttgtattttagtagag

SEQ ID NO: 15076 - DNA, 201 bp, Artificial Sequence
  Description of Artificial Sequence: Synthetic polynucleotide
gagtgtaatggygygatttyggtttattgtaagtttygtttttygggtttaygttatttttttgttttagttttttaagtagttgggattagaggtgttygtygttaygtttagttaattttttgtatttttagtagagayggggttttatygtattagttaggatggtttygattttttgatttygtgattygttygttt

SEQ ID NO: 15077 - DNA, 201 bp, Artificial Sequence
  Description of Artificial Sequence: Synthetic polynucleotide
tatagggtgtygaaattaagttatttagggagttygtagattttatttttttyggtgagagagtttggtggggagtattttatttaatgtagggaatagygttattgyggtttttatttttyggttttaagtgatttatttgtygtagttttttaagtagttgggattataggygygtgttattaygtygggttagttttt

SEQ ID NO: 15078 - DNA, 201 bp, Artificial Sequence
  Description of Artificial Sequence: Synthetic polynucleotide
ttttttttttgggggtttttttatgttttatgtagtttatggtgtggggtttattggttttggyggggtggaaggttttatgtygtygtygttttaygtygtyggtggtgggggtttgttgggggttgggaggaaggtaaataggaagggtttatyggggagagggtgggggagtaygttatagtygtygtagttygtygt

SEQ ID NO: 15079 - DNA, 201 bp, Artificial Sequence
  Description of Artificial Sequence: Synthetic polynucleotide
tttaggtgygttygttatttttttgattyggaaagggaattttttgattttttgygttttttaagtgaggtaatgttttattttgtttyggtttaygtayggtgtgygtatttattgatttgtgtttattgtttggtattttttagtgagatgaattyggtattttagatggaaatgtagaaattattygttttttgygtc

SEQ ID NO: 15080 - DNA, 201 bp, Artificial Sequence
  Description of Artificial Sequence: Synthetic polynucleotide
ggttgtagtgtagtggygygattttygtttattgtaagttttttttttygggtttaygttatttttttgttttagtttttgagtagttgagattataggygttygttattatattyggttaattttttgtaaaaaatttaaaaaaaaaattaaagataaaatgggttyggtagtatgatattttttatttttaattatttg

SEQ ID NO: 15081 - DNA, 201 bp, Artificial Sequence
  Description of Artificial Sequence: Synthetic polynucleotide
ttttgttttttttaagygtyggttaggttgagaaataaagggatagagtataaaagagggaaattttaaagtygggtattygggggagatattatatgtyggtaggttttgtgatgtttttgagtygtaaaattagtaagtttttattagggatttttaaaaggggagggagtgtaygaatagggtgtgggttatagagat

SEQ ID NO: 15082 - DNA, 201 bp, Artificial Sequence
  Description of Artificial Sequence: Synthetic polynucleotide
agtagtgtttttataaataggygtgaaaatygagtatgttttgggttggttagttgaattattgygtgtagagagggagttttggtygtataggtatagyggyggattatgtttttatatatgtygtttgtatagaaaatggagaataagtttttttttgggtygggtttttaagattataataataagagttygttaaag

SEQ ID NO: 15083 - DNA, 201 bp, Artificial Sequence
  Description of Artificial Sequence: Synthetic polynucleotide
ttttaggggttttaaatyggagttttatttttaggatttataaaattttagatatagttaggatttgttagggagattagtttttttyggtagtttgggygttgttgtttttaatatatagtgataattyggaatttatttttagagttatttagaaataygttttggagatggtgtttttygaaagatttttatttttaa

SEQ ID NO: 15084 - DNA, 201 bp, Artificial Sequence
  Description of Artificial Sequence: Synthetic polynucleotide
ggatgtttggttatatttgattttttatttttgggtatggaggtttgtttgtagaggttygggttygggtataaagggagagagaggtttttattgtttygtaggggtygaaatgtagatygtgtattttyggtgatttyggggatttttttttgattattaggatttttttggattttagggtttttgttttgtttaggt

SEQ ID NO: 15085 - DNA, 201 bp, Artificial Sequence
  Description of Artificial Sequence: Synthetic polynucleotide
ttagtagagayggggttttatygtgttagttaggatggtttygattttttgatttygtgattygttygtttyggttttttaaagtgttgggattataggygtgagttatygygttyggttatttattttttttaagagatggttgatatgattttaatttttttaaatttttgaagatttgttttgtgatttagtatgtga

SEQ ID NO: 15086 - DNA, 568 bp, Artificial Sequence
  Description of Artificial Sequence: Synthetic polynucleotide
aggtggagttgtttgttagttyggygtygtgtgttygtattttttagtttttgggtagtygatgggattgggygtygtggaataggggttggygttygtyggggaggtttgggttgtataggagygtayggygggggtggaggtttaggtatggagggttgtaggtttygagttttgttyggyggggaggtagttaaggtttagygagaagtygagtatagtagttgttggtttaggtgttaagttttttattgttygggtyggttggtygtttygagtgyggggtttgttaagtttaygtttattyggaattygagttggttygtaagygtagtttgtagttayggttttygtttaygtttttttttttatatttattygtaagttgagggagtyggttttagttttgtttagtttagaaaggggtttttatagtgtagygaygggttgaagggttttttaaaygyggttagagtgggygttaaggtygaggaggtgtygagagggagygagggttgtgagggttgttagtaygttgttattttttatttttgtgtttgtatattaa

SEQ ID NO: 15087 - DNA, 201 bp, Artificial Sequence
  Description of Artificial Sequence: Synthetic polynucleotide
ttttttttttttttttttttttttttttttttgagayggattygtgttttgtygtttaggttggagtgtagyggygygattttygtttattgtaagtttygtttttygggtttaygttatttttttgttttagtttttygagtagttgggattataggtatttattatgatgtttagttaattttttgtatttttagtaga

SEQ ID NO: 15088 - DNA, 201 bp, Artificial Sequence
  Description of Artificial Sequence: Synthetic polynucleotide
attttagagaagtttatgggagttttagggagagttttttttgtgaagggtagggtattttggaatgggtttgtygagttygtttttattyggaatttaygtttgtttataagygttttatatagttttggtttttatttgygtttttttttttatattttttygtaagtagagggagttaatttyggttttggttagttt

SEQ ID NO: 15089 - DNA, 201 bp, Artificial Sequence
  Description of Artificial Sequence: Synthetic polynucleotide
ggataaagaaaatgtggtatatggttgggtayggtggtttaygtttgtaatttyggtattttgagaggttaaggygggtagattaygaggttaggagatygagattattttggttaataygatgaaattttatttgtattaaaaaatataaaaaattagttaggtatggtggygggtgtttgtagttttagttatttggga

SEQ ID NO: 15090 - DNA, 201 bp, Artificial Sequence
  Description of Artificial Sequence: Synthetic polynucleotide
ttgtattttagtttgggggatagagtgagatttygttttaaaaaagaaagaaaaaaatgtttttttttttttgttttttttgatttttattttgttttgygggttttttattaataatygttygtgtttgattygggtgttttttttattataattttttttttaggtgtatgtttttataataaagtttattttatggtt

SEQ ID NO: 15091 - DNA, 201 bp, Artificial Sequence
  Description of Artificial Sequence: Synthetic polynucleotide
ttagttttatttatgygttatttatggataagggtaattattagtagtagtgattatgtgtgttaggtattygtaggttttttttygttttttgaattaygtgttaygtttagtttagggatgataaattgaggtgtaygagtaggtgagaagaygaatagtgtattygggtaaggtygttagtttttttgtgtttttgtg

SEQ ID NO: 15092 - DNA, 201 bp, Artificial Sequence
  Description of Artificial Sequence: Synthetic polynucleotide
ttattattgatatttattttttttttatttatagtattygtatgtaygttaagaatyggattggtaagagygagtttagtaaygagtttattattayggyggaygaggtaggtaygtgggatygggyggaattttgttttagaggagttygggagttaatttttgagggtttagatgtttaaatgtagaagtagatttttg

SEQ ID NO: 15093 - DNA, 201 bp, Artificial Sequence
  Description of Artificial Sequence: Synthetic polynucleotide
gygggaggygygtaagtgatatattgaggggtttaggtagtagtttttataygttgttaggttagagtagtttygggttaygtgggtgtttttagttgtygttgtaggyggaggtaygtyggttttttaaggatgtgatagyggttggatttttatgattattgtttggttattagagggtaagttttagggttagttaag

SEQ ID NO: 15094 - DNA, 201 bp, Artificial Sequence
  Description of Artificial Sequence: Synthetic polynucleotide
gggtyggtttygggtygtttggggtttttgygatttttatatttatttttttygtagggtgyggygttgggttttatggtgggttttatgatttaygggyggygttaattttagtttttggataygaygatgyggygtttgatttygttttttygygaggtttyggttaagttaattaygttggtggatgtygaygtygag

SEQ ID NO: 15095 - DNA, 201 bp, Artificial Sequence
  Description of Artificial Sequence: Synthetic polynucleotide
taatattgtttgtaaatgattgaatyggtttttgatttttttagagaagatygtgtatagatattyggatgattttattagttaggaaattgagyggggygggaygtatttgtagtagtggtyggatagygtgattatgtaggatggayggtttagatggttatgttgtagtttattagtagtaggtttttaaggtgatta

SEQ ID NO: 15096 - DNA, 201 bp, Artificial Sequence
  Description of Artificial Sequence: Synthetic polynucleotide
tyggatagtaaataygygtgggttttttttgtgtyggatagtaaataygygtgggtttttttgtgttaaayggtaaataygygtgggtttttygtgtgtygaatagtaaataygygtgggttttttttgtgttygatagtaaataygygtgggtttttygtgtgtyggatgataaataygtatgggtgttttgtgtgttgg

SEQ ID NO: 15097 - DNA, 201 bp, Artificial Sequence
  Description of Artificial Sequence: Synthetic polynucleotide
gttttattatgttggttaggttggtttttttaatttttgatttygtgatttatttatttyggttttttaaagtgttgggattataggagtgagttattgygttyggttgagatttttatgttattattttatgaagtttttggtataatgtttgatatatagtaggtatttgataagtggagtttttattgttgttttttt

SEQ ID NO: 15098 - DNA, 201 bp, Artificial Sequence
  Description of Artificial Sequence: Synthetic polynucleotide
gagttaggtgtgggatatagtttygtggtgygtygttttttaagttygtyggaaaagygtagtattygggtgggagtgattygattttttaggtgygttygttatttttttttttgattaggaatgggaattttttgatttttygtgtttttygagtgaggtaatgtttygttttgtttyggttygygtayggtgygtgta

SEQ ID NO: 15099 - DNA, 201 bp, Artificial Sequence
  Description of Artificial Sequence: Synthetic polynucleotide
ttttttggagttaattgtgtttttattattttaaatagagtagtygggatygggygttgtgttttaygtttataattttagtattttgygaggtygaggygggtagattaygaggttaggagatygagattattttggttaatatggtgaaaatttgtttttattaaaaatataaaaaatttttygggygtggtggygggc

SEQ ID NO: 15100 - DNA, 201 bp, Artificial Sequence
  Description of Artificial Sequence: Synthetic polynucleotide
tygatagagtgaaatggyggyggyggtygggatgatgttgttgggtttgttataggygggtgggtaggtgttgggttaggygatggaggaggtggtaggyggtaattttttgtttatgttgttgatygtttgygtttttatttttagtttggtttatttgtttygtttygttgtyggttatttggtttagttgatygtagg

SEQ ID NO: 15101 - DNA, 201 bp, Artificial Sequence
  Description of Artificial Sequence: Synthetic polynucleotide
gtgaaattttgtttttattaaaaatattaaaaaaattagtyggygyggtggtaggygtttgtagttttagttattygtaaagttgaggtaggagaatggygtgaattygggaggyggagtttgtagtgagttgagatygygttttygtattttagtttgggtgatagagygagattttgttttaaaaaaaaagtagtttgg

SEQ ID NO: 15102 - DNA, 201 bp, Artificial Sequence
  Description of Artificial Sequence: Synthetic polynucleotide
tttttatttttgtttttgagatggagttttatttttatttaggttggagtgtagtagtatgatttgggtttattgtaatttttgtttttygggtttagtygatttttttgttttagttttttaagtggttggaattataggtatatattattatattyggtaaatttttttttttttttttttgtatttttagtagattgt

SEQ ID NO: 15103 - DNA, 201 bp, Artificial Sequence
  Description of Artificial Sequence: Synthetic polynucleotide
tatggtgaaatttygattttgttaaaaatataaaaattagtygggygtggttgtgagtatttgtaattttagttatttgggaggttgaggtaggagaatygttagaattygggaggtggaggttgtagtgagttaagatggtattattgtattttagtttgggtaatagagtgagattttattttaaaataaaaaaaaata

SEQ ID NO: 15104 - DNA, 201 bp, Artificial Sequence
  Description of Artificial Sequence: Synthetic polynucleotide
atttgttttaaggattggaagaggaaaattaaaaatattatttgaaaggtyggaygyggtggtttatatttgtaattttagtattttgggaggttaaggygggyggattaygaggttaggagttygagattagtttggttaatataatgaaatttygtttttattaaaaatataaaaattagttgggtttggtggtaggta

SEQ ID NO: 15105 - DNA, 201 bp, Artificial Sequence
  Description of Artificial Sequence: Synthetic polynucleotide
tgtagtggtataatttttgtttttgtaatttttttttttyggttttaagygattttygygttttagtttttaagtagttgggattataggttygagtttygttyggttaattttttttatatttttagtagagatggggttttattatgttggttaggttggtttygaatttttgattttaagtgattygtttattttggt

SEQ ID NO: 15106 - DNA, 201 bp, Artificial Sequence
  Description of Artificial Sequence: Synthetic polynucleotide
aataygggtggtttygygtaggaygggggttttagggtygtttgagtyggaggatagttygtagtttttatygtttgtagttgaagtgtgttgtgagatygttgtaggggttygggttatttttgttttgggggattttaaaaagttgagttatatttatgttgaaatttttattgaggataattaygtattatatagatt

SEQ ID NO: 15107 - DNA, 201 bp, Artificial Sequence
  Description of Artificial Sequence: Synthetic polynucleotide
agttttygttgattttagtaygagtygtttatatatatttaaggtyggtagtatagyggtatatgtggtaaaatygagtaggygtggatgggaagggagygtattagtttgygtgtgaaggttatatttaggggyggagggaggggagaaatatttttgtygtatttgtagtgttttattttttttagtaatttaaaaygt

SEQ ID NO: 15108 - DNA, 234 bp, Artificial Sequence
  Description of Artificial Sequence: Synthetic polynucleotide
ttttgttgaygtagtgttygtygtygtttttggatgattttagtggtgaagtggtgtattatgttataggtttgtyggaattttygtttattygtygagyggtagtaaatgaagtygaggtagtggtgtaagygatattggygtyggatagatagagygtttagtttaatgatagyggagatataattatttatttttttgttaaggagaaggggatttatgagtgtagttttt

SEQ ID NO: 15109 - DNA, 201 bp, Artificial Sequence
  Description of Artificial Sequence: Synthetic polynucleotide
tagtttttttatttgtgtagtgggygtaatgtygatgattgttttygggaagttagayggtgtttgggaggygttgagttggggttgatatagagygagygtttygtgaagtatttgggttttgtgatgtttttaagtttatagaygtattaygttatgaggaatatatttgggttggygatgttggagataagggatttt

SEQ ID NO: 15110 - DNA, 201 bp, Artificial Sequence
  Description of Artificial Sequence: Synthetic polynucleotide
tagtgagtatagatygygttattgtattgtagtttgggtgatagaagtgaaaagaaatattgttttaaaaaaaaaataggagggaggagttaagatggtygaataggaatagtttyggtttatagtttttagygtgagygaygtagaagaygggtgatttttgtatttttatttgaggtatygggtttattttattaggga

SEQ ID NO: 15111 - DNA, 201 bp, Artificial Sequence
  Description of Artificial Sequence: Synthetic polynucleotide
gatgaaatttygtttttattaaaaatataaaaatttagtygggygtggtggyggaygtttgtagttttagttatttaggaggttgaggtaggygaatggygtgaattygggaggyggagtttgtagtgagtygagattgygttattgtattttagtttgggygatagagygagattttgttttaaaaataaaataaaatta

SEQ ID NO: 15112 - DNA, 201 bp, Artificial Sequence
  Description of Artificial Sequence: Synthetic polynucleotide
gtgagtgtggggtttagttggttgttttaagtatyggtatataggtaggttttaggtagggtttgtagttggattaggtatgttatttygaagggaatgyggtggtattttaagaggggtgtttagattttgaagtttyggaaggggygattttatttgttaattagtttttttagttttgttattygtagttttagggat

SEQ ID NO: 15113 - DNA, 201 bp, Artificial Sequence
  Description of Artificial Sequence: Synthetic polynucleotide
gtgyggttttttagttagggtagttygaaatttaggaaygttttaaggttattttgtgggaattgtggygttagggtttttgaatatttttttgtttttygagtygagtygttttatttgttttttaaaygggtttygggaggaaggttygygtgtttttttaaggtgaggagttattgatgtaaattttttgtaaggatt

SEQ ID NO: 15114 - DNA, 201 bp, Artificial Sequence
  Description of Artificial Sequence: Synthetic polynucleotide
ggggatttagtttaygtgtgtgggggtygtgygtgttygtttygtttgtttatgtatgttatatatgtgagagtttatagygagggtagtttttataygygatggtttagaggagygagtattttaggttttttagtaygtttttgtgttgattttttgtagtattgtygggagttatgtgagtgtttaygtttgtgtgtg

SEQ ID NO: 15115 - DNA, 201 bp, Artificial Sequence
  Description of Artificial Sequence: Synthetic polynucleotide
tttattygtttttygtttttttttttgttggatttgaggygtygttttygtygygttgttttygygttatgttaygttaygttaygttaygttaygttaygtttttaygttaygtttaygttaygtttttatttttygtttatagggaaaygggtttyggygatgtgagggygtttgtygtgtttggtgtttttatagggg

SEQ ID NO: 15116 - DNA, 201 bp, Artificial Sequence
  Description of Artificial Sequence: Synthetic polynucleotide
agtttttaaagttttaatttttttttttttttttttttttttttttttttttttttgagtyggagttttattttgttgttaggttggagtgtagtggygygattttagtttattgtaatttttgygtttygggtttaagggatttttttgttttagttttttgagtagttgagattgtaggtaygtgttattaygtttagt

SEQ ID NO: 15117 - DNA, 201 bp, Artificial Sequence
  Description of Artificial Sequence: Synthetic polynucleotide
ttgtaggatagttttaaaaaggaaggttattttttttttgtttattatygtagtttgttaattaattagaaggtaggygttgagatagtaataattagtygatagttgyggaggattgtygggatttttatagagttygataagtgggattatagttattattagttattgagaagagtgttttttatttatagagtgtaa

SEQ ID NO: 15118 - DNA, 201 bp, Artificial Sequence
  Description of Artificial Sequence: Synthetic polynucleotide
ttaaatttttagagggtttattgtaagatttttttygggtttgaaagtttaagatgaataatttttttttttttaggtttagttttaaggygtaatttgygttagtagggtgygttagtagggtgygttagtagggtgygttagtagggtgygttagtagggtgygttagtagggtgygttagtagggtgygttagtaggg

SEQ ID NO: 15119 - DNA, 686 bp, Artificial Sequence
  Description of Artificial Sequence: Synthetic polynucleotide
attatgttttagtttttttggtygtttttatttttaaatattygaaaaatagaggygttgggtgygaggyggagagatgtataggtttggtttyggtttygttttttgtttgttttaaagggtaaggttttttygtttygygtttygtttttgttttatttaggtttygttattatgttygggggttttattygggattggtttttgttttgygtagtaaattyggaagtggattaygtggagtaaaggttttatygaggygygtgagttttgttttgttttgtattaagtttgtattttttaggtttttggtatttttgtttttgggaygtggggtttttatagatttggaaatttttgtttgtttttttttatttagagtaaattgagaygtttataagagtttggaagttgtttttttttgggtttgaagtygtttggaggttggtttygttttyggtttttttgttatagggtaatgtatatattttttatygtatagtttttttgtttaaaattttgttgatttattttgttttttgttttttaaagtttttattygtgygttggattttygttttgggygttttttagttttygtyggttttttttggagygtagygtyggggttttagttttggggaggttgggttttttgtttggttttgggagtttgtaggtgttat

SEQ ID NO: 15120 - DNA, 201 bp, Artificial Sequence
  Description of Artificial Sequence: Synthetic polynucleotide
aggttggtagattaygaggttaggagatygagatygttttggttaatatggtgaaatttygtttttattaaaaatataaaaattagtygggygtggyggygtgtttttgttttagttgttggggaggttgaggtaggagaatggygtgaattygggaggyggagtttgtagtgagtygagatygtattattgtattttagt

SEQ ID NO: 15121 - DNA, 201 bp, Artificial Sequence
  Description of Artificial Sequence: Synthetic polynucleotide
tattgtaagtttygtttttygggtttaygtygttttgttgatttygtgattygtttygtttyggttttttaaagtgttgggattataggygtgagttatygygttyggttaatagtttttaatattaattatttagagtgtgtaataatttggaaaagggtttttttttttttttttgtttttagagatagggtttttggt

SEQ ID NO: 15122 - DNA, 201 bp, Artificial Sequence
  Description of Artificial Sequence: Synthetic polynucleotide
tgggagtgattygatttttaaggtgygttygttatttttttttttgatttagaaagggaattttttgattttttgygttttttaagtgaggtagtgtttygttttgtttyggttygtatayggtgtaygtatttattgatttgygtttattgtttggtattttttagtgagatgaattyggtattttagatggaaatgtag

SEQ ID NO: 15123 - DNA, 201 bp, Artificial Sequence
  Description of Artificial Sequence: Synthetic polynucleotide
attttataaaaatgaaaattaaataagtataagaatggttatatttgggggaggagttaatatggtygaataggaatagtttyggtttatagtttttagygtgagygatatagaagatggtgatttttgtatttttaattgaggtatygggtttattttattagggattgttagatagtgggygtaggttagtgggtgygt

SEQ ID NO: 15124 - DNA, 201 bp, Artificial Sequence
  Description of Artificial Sequence: Synthetic polynucleotide
yggggttttattttgttagttaggatggtttygattttttgatttygtggttygtttgtttyggttttttaaagtgttgggattatagatttgaattatygygtygggttagttttgtgggtttttaaygtgtttttttttatttgtaatttagagttagaagaggttagygttgataggtaggtagtagttatatgaaaa

SEQ ID NO: 15125 - DNA, 201 bp, Artificial Sequence
  Description of Artificial Sequence: Synthetic polynucleotide
ttattaaaaatataaaaaattagtygggygtggtggtgggygtttgtaattttagttattygggaggttgaggtagaagaatggtatgaatttaagaggyggagtttgtagtgagtygggatagygttattgtagtttagtttgggygaaagagtgagatttygttttaaaaaaaaaaaaaaaaaaaaaaaaaaaagattt

SEQ ID NO: 15126 - DNA, 201 bp, Artificial Sequence
  Description of Artificial Sequence: Synthetic polynucleotide
ggagggtggtgagggtggggagggggaaggygggaggtygggttyggtgtatgggggtygggtatattttttttgggtatttttaggataggygaggaaygtatyggtygggattttatttaygagtaggagggtaaggtgtagtttgtgattgatgyggtgtaygttattgtttaygttttttatagtatgtattaggyg

SEQ ID NO: 15127 - DNA, 201 bp, Artificial Sequence
  Description of Artificial Sequence: Synthetic polynucleotide
ttatataagtygtagtttgggtagaygttgtatttgtagygggtttttattataggtttattgtagttatygtagattatattggggtgtattatgttgyggggygttttttgagtatayggtgggyggtggtttygtyggtatttttttttttttataggaagggtaaagagagtygttagggtgggattttttaaagtt

SEQ ID NO: 15128 - DNA, 201 bp, Artificial Sequence
  Description of Artificial Sequence: Synthetic polynucleotide
tatggggaaattttgtttttattaaaaatataaaaattagttyggygtggtggtatataattgtaattttagttattygggaggttgaggtaggagaatygttggaattygggaggyggagtttgtagtgagttaagattgygttatgtattttaatttgggygtygtagygagattttgtttttaaataaataaagtgtt

SEQ ID NO: 15129 - DNA, 201 bp, Artificial Sequence
  Description of Artificial Sequence: Synthetic polynucleotide
agtaattaataaagtgaagatatggtttattgaagygtagaaaatatttataagtygggygyggtagtttaygtttgtaattttagtattttgggaggtygagataygyggattataaggttaggagatygagattattttggttaatatagtgaaattttgtttttattataaatagaaaaaattagttgggtatggtgg

SEQ ID NO: 15130 - DNA, 227 bp, Artificial Sequence
  Description of Artificial Sequence: Synthetic polynucleotide
agattggttttttttatttaataatatgtattttaatttttagggttgggygtggtggtttaygtttgtaattttagtattttgggaggtygaggtyggyggattaygaggttaggagattaagaygattttggttaatatggtgaaatttygtttttattaaaaatatagaaaataagtygggygtggtggygggtatttgtagttttagttatttaggaggttga

SEQ ID NO: 15131 - DNA, 201 bp, Artificial Sequence
  Description of Artificial Sequence: Synthetic polynucleotide
gtttttttttygagttaaagaaaggggtgayggaygtatttggaaaatygggttatttttattygaatattgygttttttygatyggtttaaaaaayggygtattaygagattatattttatatttggttyggagtttygttgattgttagtatagtagtttgagattaaattgtaaggtggtagtaaggttgggggaggg

SEQ ID NO: 15132 - DNA, 201 bp, Artificial Sequence
  Description of Artificial Sequence: Synthetic polynucleotide
aygtagaagaygggtgatttttgtatttttatttgaggtatygggtttattttatttgggagagttagatagtgggygtaggttagtgggggtatgtatygtgygygagtygaagtagggagaggtattgttttatttgggaagygtaaggggttagggagtttttttttygagttaaagaaaggggtgatagaygtattt

SEQ ID NO: 15133 - DNA, 201 bp, Artificial Sequence
  Description of Artificial Sequence: Synthetic polynucleotide
ggtattygttattaygttyggttaattttttgtatttatagtatagayggggttttatygtgttagttaggatggtttygattttttgatttygtgattygttygtttttgttttttaaagtgttgggattataggygtgagttatygygttyggtggaaaggatatttttttatagtatgagtattgaaataaaaaggta

SEQ ID NO: 15134 - DNA, 201 bp, Artificial Sequence
  Description of Artificial Sequence: Synthetic polynucleotide
aatygtgttattggaagttaggaagtaaattttaattttagtattgtttttttttgaaatggagtttygttttgttatttaggttggagtgtagtggygygatttyggtttattgtaagtttygtttttygggtttattttatttttttgttttagtttttygagtagttgggattataggtgttygttattaygttyggt

SEQ ID NO: 15135 - DNA, 201 bp, Artificial Sequence
  Description of Artificial Sequence: Synthetic polynucleotide
tttgggtgatygtttgtaatggagggagtgtgtgggttggtttgttagyggagagatttgttttaygttattaggagtttggtygagtattayggtgatygtggtygggtggaaggagatggaygtttatttgtgtaatttgtttttattttttttttaggggttattttagaataaaatgtaatggtttttttttgttta

SEQ ID NO: 15136 - DNA, 201 bp, Artificial Sequence
  Description of Artificial Sequence: Synthetic polynucleotide
ataagttggttgttyggtaggttatattggggtttttaagagtttgggttgtagaygaatttaggtttgttttttttaattagtgtgattygggtaagtygygttttttttttgagttttagtttttttattttttaaatgggggtgaygttatttttattgttaggggtttttttgagygggttataggaaggtgtttag

SEQ ID NO: 15137 - DNA, 201 bp, Artificial Sequence
  Description of Artificial Sequence: Synthetic polynucleotide
tttagtttgggatyggtagtatttttatttgtaygttatttttagggayggtaatattgtttattttgagtttagagtagttattattttyggttttttygttggttttttgggaggttttaggaagaygtgattttttgttaggtattygtgggtttttttatagttgtyggggtggtttttgtttttttaaaattatat

SEQ ID NO: 15138 - DNA, 201 bp, Artificial Sequence
  Description of Artificial Sequence: Synthetic polynucleotide
aaagttatygtaggtaattagaaaagttgtttttattttatggttgtgtttatttgyggtagataggataatggtttaaagatgtttgagattygtgatygttttattttgtgatygtattattttatatggtaaagaagtttttgtaygtgtgattaygattaaggattttgagattyggagatgatttgggtattyggg

SEQ ID NO: 15139 - DNA, 201 bp, Artificial Sequence
  Description of Artificial Sequence: Synthetic polynucleotide
gtggyggtaggtttgttgygttygttttagttagggtttagagtttttyggttagtttatygtatttggattttagatgggygygttgggtggtgttygygttagggaaagagttggyggttggttgagttgttgygtttttgagygttgtgttygttgtgattattggygtggttgtttttyggtaggttygaaggaatc

SEQ ID NO: 15140 - DNA, 201 bp, Artificial Sequence
  Description of Artificial Sequence: Synthetic polynucleotide
ttttygatattttgtttttatattgtattattygtyggtaatygttttyggatagyggttaggtygyggggaggttggttttggagtttattttyggggygtatattttygttaattttttygaggtggggtataggatygtggtgttgtattayggggatttgttttttttggggttttattatttgttgttatttaagg

SEQ ID NO: 15141 - DNA, 201 bp, Artificial Sequence
  Description of Artificial Sequence: Synthetic polynucleotide
gggtttagaggtattttagtaaatggtttaggaattgtagtattaatttatattgagaaatagaattgttatttaagaaagataattgttggtttaatgyggtggtttaygtttgtaattttagtattttgggaggtygaggttggyggattaygaggttaggagatygagattattttggttaatagggtgaaattttgt

SEQ ID NO: 15142 - DNA, 201 bp, Artificial Sequence
  Description of Artificial Sequence: Synthetic polynucleotide
tayggtgaaattttgtttttattaaaaatataaaaaattagttaggtgtggaggtattttttgtaattttagatatttaggaggttgaggtaggaaaatygtttgaattygggaggtggagtttgtagtgagttgatatygtattattgtgttttagtttgggtaatagagtaaaattttgttttaaaaaaaaaaaaaaaa

SEQ ID NO: 15143 - DNA, 201 bp, Artificial Sequence
  Description of Artificial Sequence: Synthetic polynucleotide
tatttttttgttttagttttaggagtagttgggattataggygttygttataaygttyggttaattttttttgtatttttagtggagayggggttttatygtgttagttaggatggtttygattttttgatttygtgatttattygttttagttttttaaagtgttgggattataggtgtgagttatygygtttagttgtt

SEQ ID NO: 15144 - DNA, 201 bp, Artificial Sequence
  Description of Artificial Sequence: Synthetic polynucleotide
gtttatagtttttagygtgagygatgtagaagaygggtgatttttgtatttttatttgaggtatygggtttattttattagggagggttagatagtgggygtaggttagtgggtgygygtatygtgygttagttaaagtagggtaaggtattgttttatttgggaagygtaaggggttagggagtttttttttygagttaa

SEQ ID NO: 15145 - DNA, 201 bp, Artificial Sequence
  Description of Artificial Sequence: Synthetic polynucleotide
tggtaaaattttatttttattaaaaatataaagatttagtatgggtatggtggtgtatatttgtaattttagttgtttgggaggttgaagtagaagaatygygtgaattygggaggtagaagttgtagtgagttaagattaygttattgtattttagtttgggtgatataaygagattttgtttaaaaaataaaataaaaa

SEQ ID NO: 15146 - DNA, 201 bp, Artificial Sequence
  Description of Artificial Sequence: Synthetic polynucleotide
aaattttttatttttttgaggtagagttttattttgtygtttaggttggagtgtagtagygtgatttyggtttattgtaagttttatttttygggtttaygttatttttttgttttagttttttgagtagttgygattataggtgttttttattaygtygggttaattttttgtatttttagtagagayggggttttattg

SEQ ID NO: 15147 - DNA, 201 bp, Artificial Sequence
  Description of Artificial Sequence: Synthetic polynucleotide
tttygagtagttgggattataggygttygttattaygttyggttaatattttgtatttttagtagagayggggttttatygygttagttaggatggtttygattttttgatttygtgatttgtttgtttyggttttttaaagtgttgggattataggygtgagttatygygttyggtttattttttttattttttatagag

SEQ ID NO: 15148 - DNA, 201 bp, Artificial Sequence
  Description of Artificial Sequence: Synthetic polynucleotide
tgagtygagyggagattgygttattgttttttagtttgggtgatagagggagattttgtgtttaaaaaaaatagatgtaggtaggagtttttttttyggygtttatatttagattgaagaaagtaattgggttgggttyggtggtttagatttgtaattttagtattttgggaggtttaggtagaygtattattttagttt

SEQ ID NO: 15149 - DNA, 201 bp, Artificial Sequence
  Description of Artificial Sequence: Synthetic polynucleotide
ttggagtagtggtaggtggtaagggttgggtggggggttgttttattgggttttttattttttttttttttttttaattttttttttttttttttgagayggagttttgttttgttatttaggttggagtaaagaggtatgatttyggtttatagtaatttttgtttttygggtttaagtgatttttttgttttatgtttt

SEQ ID NO: 15150 - DNA, 201 bp, Artificial Sequence
  Description of Artificial Sequence: Synthetic polynucleotide
tgaagggagggaygagagttttattatttaattttaagtttagtggtyggtgtttttggaagtggagatatatgtttattggtgtgygatttatatttaygaaagggaaygtgttttttggaatataggggagttttggttagggaagtygtttttttatttaagagggataaaggtgtgtaaattttagaaattagatat

SEQ ID NO: 15151 - DNA, 201 bp, Artificial Sequence
  Description of Artificial Sequence: Synthetic polynucleotide
aaattatttttgatttgagatataaaaataaagaggtygggygtaaggtggtttaygtttgtaattttagtattttgggaggtygaggygggyggattaygaggttagtagatygagattattttggttaatayggtgaaatttygtttttattaaataaaatataaaaaattagtygggygtggtggygggygtttgtag

SEQ ID NO: 15152 - DNA, 217 bp, Artificial Sequence
  Description of Artificial Sequence: Synthetic polynucleotide
ttttgaatgaaattaggaaggagaaagtatgggataatgggtttttgataatgataaaaagagaaaaaataaatagaaaaaagaggagggtyggtygggygyggttaggaaggygyggttttggttaggagatygagattattttggttaaygyggtgaagtttygtttttattaaaaatataaaaaattagtygggygtggtggggggygtttgta

SEQ ID NO: 15153 - DNA, 217 bp, Artificial Sequence
  Description of Artificial Sequence: Synthetic polynucleotide
tygttatttttttttttgattgggaaagggaattttttgattttttgttttttttaagtgaggtagtgtttygttttgtttyggttygygtayggtgtaygtatttattgatttgygtttattgtttggtattttttagtgagatgaattyggtattttagatggaaatgtagaaattattygttttttgygtygtttaagttgggagttgtagatc

SEQ ID NO: 15154 - DNA, 201 bp, Artificial Sequence
  Description of Artificial Sequence: Synthetic polynucleotide
tgttggtgggagttaaaatggattaattatataaaaaataatttttaggtygggygtagtggtttaygtttgtaatttyggtattttgggaggttaaggygggyggattaygaggttaggaaatygatattattttggttaataaggtgaaattttatttttattaaaaatataaaaatttagtygggygtggtggygggt

SEQ ID NO: 15155 - DNA, 201 bp, Artificial Sequence
  Description of Artificial Sequence: Synthetic polynucleotide
tggagattttttatttattgtggtagtaaattygtttgaggtgtttgtatgttttagtttyggggtttygggggtygtgtttatagtttttttatttttyggtttttaygttagggttttyggtttatatygtgttgttttgttttatatgagatyggaaagttatatgtggataatttaggatttatttagggttatata

SEQ ID NO: 15156 - DNA, 201 bp, Artificial Sequence
  Description of Artificial Sequence: Synthetic polynucleotide
gtagggttygaattttttttttaggagggttagggttgyggtygggygaygttaggtggggaagatattagaagaggagaaaattaggagygtaggaygyggtgggagattgggaggttgtagagaggaggtttgaggataggagggaaggaggyggggatagaggtygagggttggaggggttgtygggttttttttggg

SEQ ID NO: 15157 - DNA, 201 bp, Artificial Sequence
  Description of Artificial Sequence: Synthetic polynucleotide
gttatygygttyggttaatttttttgtatttttttagtagagtyggggttttatygtgttagttaggatggttaygattttttgattttgtgattyggtygtttyggttttttaaagtgttgggattataggygttaagttatygygttyggttgatagttagatttttaaaggtgtttgaatttttttaatgtggaaata

SEQ ID NO: 15158 - DNA, 201 bp, Artificial Sequence
  Description of Artificial Sequence: Synthetic polynucleotide
agtttaygtayggtgygygtatttattgatttgtatttattgtttggtattttttagtgagatgaattyggtattttagatggaaatatagaaattattygttttttgygtygtttatagtgggagttgtagatyggagttgtttttattyggttattttggtttgattyggagtggtataygtttttaaataattaaatt

SEQ ID NO: 15159 - DNA, 201 bp, Artificial Sequence
  Description of Artificial Sequence: Synthetic polynucleotide
ttggygagaagtygagtatagtagttgttggtttaggtgttaagttttttattgttyggggttgttggtygttttaagtgygggttagtttagtttaygygtattyggaagtygygttggtgagggagggttgygagggttgttagtatgttattattttttattgggattataggygtgagttayggygttyggttgaag

SEQ ID NO: 15160 - DNA, 201 bp, Artificial Sequence
  Description of Artificial Sequence: Synthetic polynucleotide
ttaygttatttttttgttttagtttgtagttgggattataggtgttygttattaygttyggttattttttttgtatttttaatagagayggggttttatygtgttagttaggatggttttaatttgttgatttygtgattygttygtttyggttttttaaagttttgggattgtaggagtgagttatygygttyggttgta

SEQ ID NO: 15161 - DNA, 201 bp, Artificial Sequence
  Description of Artificial Sequence: Synthetic polynucleotide
tagattggagtgtagtggtaygatttyggtttagaattttygttttatgggtttaagtaatttttttgttttagttttyggagtagttgggattataggygttygttattaygttaggttaattttttgtatttttagtagggayggttgatygggygyggtggtttaygtttgtaattttagtattttgggaggtygagg

SEQ ID NO: 15162 - DNA, 201 bp, Artificial Sequence
  Description of Artificial Sequence: Synthetic polynucleotide
tattttttagatgggatagyggtygggaagaggygttttttattttttagatgggatggyggttaggtagagaygttttttattttttagayggggtggyggtygggtagaggttgtaatttyggtattttgggaggttaaggtaggttgttgggaggtgaaggttgtagygagtygagattaygttattgtattttagtt

SEQ ID NO: 15163 - DNA, 201 bp, Artificial Sequence
  Description of Artificial Sequence: Synthetic polynucleotide
gatggagttgtttgttagtttyggtattgtgygttygtattttttagtttttgggtggttaatgggattgggtgtygtggagtagggggtggygttygtyggggaggttygggtygtataggagtttayggaaggggtgggaggtttaggtatggygggttgtaggtttygagttttgtttygygggaaggtagttaaggt

SEQ ID NO: 15164 - DNA, 286 bp, Artificial Sequence
  Description of Artificial Sequence: Synthetic polynucleotide
gagttaggtgtgggatatagtttygtggtgtatygttttttaagtyggtttgaaaagygtaataatygggtgggagtgattygattttttaggtgygttygttatttatttatttgattyggaaagggaattttttgattttttgygttttttaggtgaggtaatgtttygttttgtttyggttygygtayggtgygygtatttattggtttgygtttattgtttggtattttttagtgagatgaattyggtattttagatggaaatgtagaaattattygttttt

SEQ ID NO: 15165 - DNA, 201 bp, Artificial Sequence
  Description of Artificial Sequence: Synthetic polynucleotide
aggtaaagttgtttgttagttttatgttttgtgtttaygttttttagtygttttatagtygatgggatygggtgttatggagtagggggyggtgttygtyggggaggtttttgttgtataggagtttagggtagtggggggaggtttatatatggtaggttgtaggttttaagttttgtttygtagggaggtagttgaggt

SEQ ID NO: 15166 - DNA, 201 bp, Artificial Sequence
  Description of Artificial Sequence: Synthetic polynucleotide
aggygggtggattaygaggttaggggttygagaygagtttggttaatatggtgaaatttygtttttattaaaaatataaaaattagttgggygtggaggygygygtttgtaattttagatattygggaggttgaggtaagagaatygtttgaattygggaggyggaggttgtagtgagtygagatggtgttattgtatttt

SEQ ID NO: 15167 - DNA, 201 bp, Artificial Sequence
  Description of Artificial Sequence: Synthetic polynucleotide
gagygaygtagaagaygggtgatttttgtatttttatttgaggtatygggtttattttattagggagtgttagatagtgggygtaggttagtgggtgtgygtaatgtgygygagtygaagtagggygaggtattgttttattygggaagygtaaggggttagggagtttttttttygagttaaaggaaggggtgayggagg

SEQ ID NO: 15168 - DNA, 201 bp, Artificial Sequence
  Description of Artificial Sequence: Synthetic polynucleotide
gtgtygtttgttatttttttttttgattaggaaagggaattttttgattttttgygttttyggagtgaggtaatgtttygttttgttttagttygtatayggtgtatgtatttayggatttgygtttattgtttggtattttttagtgagatgaattyggtattttagatggaaatgtagaaattattygttttttgygtt

SEQ ID NO: 15169 - DNA, 201 bp, Artificial Sequence
  Description of Artificial Sequence: Synthetic polynucleotide
atttttatttgaattttgatagtagttattatgtagagttgttaaaatgtatatttttggtygggtgyggtggtttaygtttgtaattttagtattttgyggggtygaggygggyggattaygaggttaagagattaagattattttggttaatatggtgaaattttgtttttattaaaaatataaaaaaaattagttggg

SEQ ID NO: 15170 - DNA, 201 bp, Artificial Sequence
  Description of Artificial Sequence: Synthetic polynucleotide
ttaggtgttattygttatttttttttttgatttagaaagggaattttttgattttttgygttttttaggtgaggtaatgtttygttttgtttyggttygygtayggtgygtatatatattggtttgygtttattgtttggtattttttagtgagatgaattyggtattttagatggaaatgtagaaattattygttttttg

SEQ ID NO: 15171 - DNA, 201 bp, Artificial Sequence
  Description of Artificial Sequence: Synthetic polynucleotide
tttagtttatygttgtattgtgagagtttttttttgggttggttaaggttagagttygtttttttagtttgtagggaggtgtggatggagaggygtgagygggaatttaggttgtgtatggtgtttgygggttagttggagtttygggtgggygtgggtttggtaggtttygtattgggagtagtyggtyggttttgttag

SEQ ID NO: 15172 - DNA, 201 bp, Artificial Sequence
  Description of Artificial Sequence: Synthetic polynucleotide
ggggagagggattgattttttgtgttttatttttagtttatttaattttagtgtagtttggagattgttatygtgtttttyggagggygatggagttttygttttgtttaggagtagtttggttttygggagggtagtttgatttttayggtattgtyggtgattttttagtttaggtttyggggttgygagaattttaag

SEQ ID NO: 15173 - DNA, 201 bp, Artificial Sequence
  Description of Artificial Sequence: Synthetic polynucleotide
atgagygttatygayggtagagtygttttttttatgttttgtggggatygggaagagatygtagggagtgaggtattttattygtttattyggtagattygaagattgagattygagagttygtagtttygggttatatttttagygtttggtttagttttttttttatttttttattygttttttgtagaygaggggttt

SEQ ID NO: 15174 - DNA, 201 bp, Artificial Sequence
  Description of Artificial Sequence: Synthetic polynucleotide
gttgtaattttattgagtgtgtttgtttattagatatttgattttgtaagattgttttttttttttttttttgayggagtttygttttgtygtttaggtygaagtgtagtggygygatttyggtttattgtaagtttygtttttygggtttatgttatttttttgttttagtttttygagtagttgggattataggygttc

SEQ ID NO: 15175 - DNA, 210 bp, Artificial Sequence
  Description of Artificial Sequence: Synthetic polynucleotide
ttttgggtttttattttttttttttttttttttttttttttgagaygaagttttattttgtygttygggttggagtgttgtggtaggatttyggtttatygtaagtttygtttttyggatttaygttatttttttgttttagtttttygagtagttgggattagaggygttygttatygygttaggttaatttttttgtatttttagtag

SEQ ID NO: 15176 - DNA, 201 bp, Artificial Sequence
  Description of Artificial Sequence: Synthetic polynucleotide
taagttgggygyggtggtttaygtttgtaattttagtattttgggaggtttaggtaggyggattaygaggttaggagattaagattattttggttaatayggtgagaatttygtttttataaaaaatataaaaaattagtygggtgtttgtagttttagttattygggaggttgaggygagagaatggygtgaattygggg

SEQ ID NO: 15177 - DNA, 201 bp, Artificial Sequence
  Description of Artificial Sequence: Synthetic polynucleotide
gggttaaagaggaatyggaaagggttyggggtagaygtgggygttatagggtgagtygggttaggttgagaggatttaygggttatgggagtttgtgggygayggttyggtaggggtttgyggygggaatagggataaaatatatttaataaattgtttatttagagtaagttgtgtgggtataatggygagaaaayggtt

SEQ ID NO: 15178 - DNA, 201 bp, Artificial Sequence
  Description of Artificial Sequence: Synthetic polynucleotide
ggygggtgggttaygaagttaggagatygagattattttggttaatatggtgaaattttatttttattaaaaatataaaaaattagtttggtatagtggygggygtttgtagttttagttagttyggaggttgaggtaggagaatggygtgaattygggaggyggagtttgtagtgagtygagattgygttattgtattat

SEQ ID NO: 15179 - DNA, 201 bp, Artificial Sequence
  Description of Artificial Sequence: Synthetic polynucleotide
gtttatgttattttaatagtgggttttttttyggtgagaattggttaatagttattgtttygtttttttagtatgttgtttgattagagagggatagggyggggaggaaaatyggggygtygtgggttgtagttttagttgtaaataygggagtttttttygaygtttgtggttygtyggttygaaagggagaaataygga

SEQ ID NO: 15180 - DNA, 201 bp, Artificial Sequence
  Description of Artificial Sequence: Synthetic polynucleotide
ttatgaatttttgagtttaagtgatttttttatttggttttgygaagtgttgggattatatgtgtgagttattaygtygggattataggtgtgagttatygygtygggattatgggtatgagttattgygtyggtttttagtaaatattttattagtatttagtgaattttgggtttttgtggaataggaatgtttgtttt

SEQ ID NO: 15181 - DNA, 201 bp, Artificial Sequence
  Description of Artificial Sequence: Synthetic polynucleotide
aggttgaggttggtggattataaggttaggagatygagattattttggttaatatggtgaaatttygtttttattaaaaatataaaaaaattagtygggygtggtggtgtgtatttgtagttttagttattygggagtttgaggtaggagaatggtatgaattygggaggtagagtttgtagtgagttaaaattgtattat

SEQ ID NO: 15182 - DNA, 201 bp, Artificial Sequence
  Description of Artificial Sequence: Synthetic polynucleotide
aaggagatgtttgggttaggattgaagtttttyggaataaygggttgggattttgaggttggtaggggtgtagtgggtattgggtttatgtgtggtttgygttggtygaygtgggtatataaggggtatagttgttattgggggtttggaggggaggatttagttggggtttggagggttaggattttgtagaaggtttac

SEQ ID NO: 15183 - DNA, 201 bp, Artificial Sequence
  Description of Artificial Sequence: Synthetic polynucleotide
tatggtgaaatttygttttaattaaaagtattaaaattatttgggtatggtggtatatgtttgtaattttagttattygggaggttgaggtaggagaatygtttgagttygggaggyggaggttgtagtgagtygtgatygygttattgtattttagtttgggygatagagtaagattttattttaataaaaaaattaaaa

SEQ ID NO: 15184 - DNA, 201 bp, Artificial Sequence
  Description of Artificial Sequence: Synthetic polynucleotide
gygatttttttgttttagtttttygagtagttaggattataggygttygtttttaygttyggttaattttttgtatttttggtagagayggggttttatygtgttagtaaggatagtttygattttttgatttygtgattygtttgtttyggygttttaaagtgttgggattataggtatgagttatygygtttggtgggg

SEQ ID NO: 15185 - DNA, 201 bp, Artificial Sequence
  Description of Artificial Sequence: Synthetic polynucleotide
agtgaaatttttttttattaaaaatttaaaaaaattagtygggtgtggtagtatgtgtttgtagttttagttattygagaggttgagataggagaatggygtgaattygggaggyggagtttgtagtgagtygagatygtgttattgtattttagygtgggygatagagtaagatttygttttaaaaaaaaagaaaataat

SEQ ID NO: 15186 - DNA, 201 bp, Artificial Sequence
  Description of Artificial Sequence: Synthetic polynucleotide
agattatagatgaatttgaattttaagtagtatagatgygttatatttattattttgtygttgattattttygggattatattatatttattatttygtygttgattattttygggattattatggygggttatgatagtaygttttttttagaaataygtttgaatagtataagaaaaggatattattyggattygygga

SEQ ID NO: 15187 - DNA, 201 bp, Artificial Sequence
  Description of Artificial Sequence: Synthetic polynucleotide
ygttgttatttataagagtttttttttttttgtaattaatggttttgtttttggtttgtttagtaaattgaaattatygaaaaaggattttgtygggagyggtggtttaygtttgtaatattagtattttgggaggtygaggygggttgattataaggttaggaaatygagattattttggttaatayggtgaaatttagt

SEQ ID NO: 15188 - DNA, 201 bp, Artificial Sequence
  Description of Artificial Sequence: Synthetic polynucleotide
ttagagttaggygtttatygttaattyggagtgtgtgttttagttttttggggtygattttggttgttgggttagtagtgtgaattttttttttttatayggggtttttaagataygtgtttgtgtgtgttygtttttaagatatgtgtgtgtgtatatgtgtgtgtgtgtgtgtgttttatatgaaygatttgagttatt

SEQ ID NO: 15189 - DNA, 201 bp, Artificial Sequence
  Description of Artificial Sequence: Synthetic polynucleotide
gttagtgtttttayggtagtttttgtattgggttyggggtgggggyggggggtggttgtggagtttttggtttttatttagygtgttttttttayggggygtattttaaagygataagatgttttttaggaaatggggaatggaygttaggtttttagggagaggttgaggtagtttgaggtaaaaagggaygggtygagg

SEQ ID NO: 15190 - DNA, 201 bp, Artificial Sequence
  Description of Artificial Sequence: Synthetic polynucleotide
gggtgtttatggagtttttagtttttatttagggtgygtgttttttttayggggggtattttaaaggggtatgaagtttttygggggatggggatatgaygttaggtttttagtgggatattgagatagtygggggaaaaaagtygggagggtaagaaggttggggtatttttatggaggttagtttttttttagtagttt

SEQ ID NO: 15191 - DNA, 201 bp, Artificial Sequence
  Description of Artificial Sequence: Synthetic polynucleotide
gtatttattgttttgtattaattgtttagtattttttagtgagatgaattygttattttagttggaaatgtagaaattatttattttttgygtygtttaygttgggagttgtagatyggagttgtttttattyggttattttggttttattttattatattttttttatttagtttattattgatggatatttgggttggt

SEQ ID NO: 15192 - DNA, 201 bp, Artificial Sequence
  Description of Artificial Sequence: Synthetic polynucleotide
gtaggtgttagggagaggtaattttttaaatagataaaaatatttttggtygggygyggtggtttatgtttgtaattttagtatttygggaggtygaygygggyggattaygaggttaggagatygagattatttttgttaatayggtgaaatttygtttttattaaaaatataaaaaattagtygggtgtggtggygggc

SEQ ID NO: 15193 - DNA, 201 bp, Artificial Sequence
  Description of Artificial Sequence: Synthetic polynucleotide
tggttttattatgttagttaggatggttttaattttttgatttygtgattygttygttayggttttygaaagtgttgtgattataggtatgagttatygygttyggtttaaaataatttttgaggttatataagaatatagtttatgtttatttatagttgtatttaatttaattaagaatttgttttttaagatgaaaaa

SEQ ID NO: 15194 - DNA, 201 bp, Artificial Sequence
  Description of Artificial Sequence: Synthetic polynucleotide
ygggttttygatttgygtggatgagtagttttgagttttatatagggygggtgaygttgtagattgataaggtttatttttggttatattgagttaaagyggaaggggtgtaggtgtggagtgttatgtgygatgttattgtyggttagttggagtggaggtgttygttatgtgtatggggagaygtgtttttggttagtt

SEQ ID NO: 15195 - DNA, 366 bp, Artificial Sequence
  Description of Artificial Sequence: Synthetic polynucleotide
tygttttgtagtttgattttagattgttgtgttagtaattagtgagatttygtgggygtaggattttttaagttaggtgtgggatatagtttygtggtgygttattttttaagtyggtttgaaaagygtaatattygggtgggagtgattygattttttaggtgygtyggttatttttttttttgattyggaaagggaattttttgatttttggygttttttaggtgaggtaatgtttygttttgtttyggttygtttayggtgygygtatttattggtttgygtttattgtttggtattttttagtgaggtgaattyggtattttagatggaaatgtagaaattattygttttttgygtygttta

SEQ ID NO: 15196 - DNA, 201 bp, Artificial Sequence
  Description of Artificial Sequence: Synthetic polynucleotide
ggtttttgtagggtygagtttttttaatgagygttgttttttgttttayggygttyggttttatygatygtttaagggttgaggattgtgggagtattgygygggattggtaggtagttttatttgyggttttyggtgygggatttattgggtgaagttagttgggttygtgagtttagtgtggatttggagaatttttat

SEQ ID NO: 15197 - DNA, 201 bp, Artificial Sequence
  Description of Artificial Sequence: Synthetic polynucleotide
ygtagaagatgagtgatttttgtatttttatatgaggtatygggtttattttattagggagtgttagatagtgggygtaggatagtgggtgtagygtatygtaygygagtygaagtagggygaggtattgttttatttyggaagtataaggggttagggagtttttttttttagttaaagaaaggggtgatagayggtatt

SEQ ID NO: 15198 - DNA, 201 bp, Artificial Sequence
  Description of Artificial Sequence: Synthetic polynucleotide
tttttttttttagttaaagaaaggggtgatagatagtatttggaaaatygggttattttaatyggaatattgtatttttttaataggtttaaaaaayggygtatttggagattgtatttygtatttggttyggagggttttatgtttayggagtttygttgattgttagtatagtagtttgagattaaattgtaaggyggt

SEQ ID NO: 15199 - DNA, 384 bp, Artificial Sequence
  Description of Artificial Sequence: Synthetic polynucleotide
ttygtttttttggtttttgttgtttatgagaaatgaggaaaaataaaggttagatttttaataattttttyggaagaaagagttgttttgagtgggtgtyggtgtttatataygttgtttttaaaaaaatttgttttgtttaggtttgtgtgaatataaygtyggatgaattttgtttttttagaagaaagtygggttggtgtgttygatgaygtagygtttgtagtggygtttgataaagygtagggtttttayggagatttygtagttttggatatttagygtttggaggttaaagtagttggyggttaygatttgtaagttttggtyggtgatgttttygtaggatttgaggttgagtygtttgaggttgaagtagtttag

SEQ ID NO: 15200 - DNA, 216 bp, Artificial Sequence
  Description of Artificial Sequence: Synthetic polynucleotide
tgggagtgattygattttttagttgygtttattatttttttttttgattyggaaagggaattttttgattttttgygttttttaggtgaggtaatgtttygttttgtttyggttygygtayggtgygygtatttattggtttgygtttattgtttggtattttttagtgagattaattyggtattttagatggaaatgtagaaattattygttttt

SEQ ID NO: 15201 - DNA, 334 bp, Artificial Sequence
  Description of Artificial Sequence: Synthetic polynucleotide
ttgtgttggtaattagygagatttygtygggtaggatttttygagttagatgygggatataatttygtggtgygtygttttttaggtyggttygaaaagygtaatattygggtgggagtgattygattttttaggtgygttygttatttttttttttgattaggaaagggaattttttgatttttggygtttttygagtgaggtattgttttattttgtttyggttygygtayggtgygygtatttattgatttgtgtttattgtttggtattttttagtgagatgaattyggtattttagatggaaatgtagaaattatygttttttatgtta

SEQ ID NO: 15202 - DNA, 201 bp, Artificial Sequence
  Description of Artificial Sequence: Synthetic polynucleotide
ttygatgtaaggyggggtaggtaaaagttyggtagttattygagaaggtgtgattaaaayggaggaattygagagatttttygaggattgtaggttyggygyggagttygygtttaatggtttggtttatggtagygyggaggttattttggttttaaygttyggtgtttttgggtygtattagtaagattttaggatttt

SEQ ID NO: 15203 - DNA, 270 bp, Artificial Sequence
  Description of Artificial Sequence: Synthetic polynucleotide
tttyggttttygttygtgtttttttttttatattttttygtaagttgagggagtyggtttyggttttggttagtttaggaatgggtttttatagtgtagyggygggttgaagggttttttaagygyggttagagtgggtgttaaggtygaggaggygttaagagygagygagggttgtgagggttgttatgtyggtatattgttattttttagaaggaygtagggtagagttttaggttggttttgttatttatgttggagtgtagtggt

SEQ ID NO: 15204 - DNA, 253 bp, Artificial Sequence
  Description of Artificial Sequence: Synthetic polynucleotide
ggtyggaaaagygtagtatttyggtgggagtgattygattttttaggtgygttygttatttttttttttgattyggaaayggaattttttgattttttgygttttttaagtgaggtaatgtttygttttgtttyggttygygtayggtgygygtatttattgatttgygtttattgtttggtattttttagtgagatgaattyggtattttagatggaaatgtagaaattatttgttttttaygtygtttayg

SEQ ID NO: 15205 - DNA, 204 bp, Artificial Sequence
  Description of Artificial Sequence: Synthetic polynucleotide
taaattagtaaatttaatattttaggatttttgttaagaagtttggttttggtygggaggatggagtttagygggtagyggagttgttttagtttttgtygtygtttygttygggagggaggtggggggggttagtttttttgttyggttagtygtttygttygggaggtgaggggygtttttgttyggtygtttttattggga

SEQ ID NO: 15206 - DNA, 228 bp, Artificial Sequence
  Description of Artificial Sequence: Synthetic polynucleotide
attygggaagtataaggggttagggagtttttttttttggttaaggaaaggggtgatagatagtaygtggaaaattaggttttttttattygaatattgygttttttttaygggtttaaaaatyggygtattaggagattatatttygtatttggttyggagggttttaygtttayggagtttygtygattgttagtatagtagtttgagattaaattgtaaggtagt

SEQ ID NO: 15207 - DNA, 217 bp, Artificial Sequence
  Description of Artificial Sequence: Synthetic polynucleotide
tttagtggtygtaggggttgtygtgtgttttgtagatggataygygttatttaatatagagatgygttgagttygggtgattagtgaatygtaygttatygtagatattagaaagygaaagtataygggggaaggtttygggtatagatttagtayggttattattygagttggagttgtttgygagaygatgagygtttgtaatttgtattttgyg

SEQ ID NO: 15208 - DNA, 201 bp, Artificial Sequence
  Description of Artificial Sequence: Synthetic polynucleotide
ttyggtgtttaatttttgaattttaaggaaaaatagggtagaatagaaagtgaaataggttygaaggtatttatygtgtggtaatattttagaygagttygatggtatttatygtgtggtaatattttagaygaatatttaagatgtgttyggagttggttttttttagtgggtttgtggttttagtgattttaagaatga

SEQ ID NO: 15209 - DNA, 204 bp, Artificial Sequence
  Description of Artificial Sequence: Synthetic polynucleotide
ayggtgygtatatttattgatttgtgtttattgtttggtattttttagtgagatgaattyggtattttygatggaaatgtagaaattatttatttttygygtygtttaygttgggagttgtagatyggagttgtttttatttggttattttggtttttttttggtattttttttattttttatttaggattagtttgttgtttt

SEQ ID NO: 15210 - DNA, 223 bp, Artificial Sequence
  Description of Artificial Sequence: Synthetic polynucleotide
tagaagtataagtaatygtttttttttgtattttagtggaaygtygtgggttttttgaagatttttttttgttttgtaggtttyggtattttaagtaygygagtttgygtaggaggygtttygtttttyggagttttttattgttttttagatatagtttyggttttttatttygggyggaggtttttttagaygggtttygattgtttttgtatgtttattg

SEQ ID NO: 15211 - DNA, 201 bp, Artificial Sequence
  Description of Artificial Sequence: Synthetic polynucleotide
tatttataaggttgaggtaggagaattgtttgaagtygggaggyggaggttgtaatgagtygagattatattattgtattttagtttgggygataagagygaaattttgtaataatattaataataataataaaataaaaataaaaataaaaaagaaaataagagaygyggtggttttgtttgtaattttagtattttggg

SEQ ID NO: 15212 - DNA, 203 bp, Artificial Sequence
  Description of Artificial Sequence: Synthetic polynucleotide
tttaatattaagttaggtttagggaagtgttttttttttttttttttttttttatttgagaygtagttttattttgttatttaggttggagtatagtggygygatttyggtttattgtaagtttygtttttygggtttaygttattttgttgttttagtttttygagtagttgggattatygttygattaatttatttgtatt

SEQ ID NO: 15213 - DNA, 201 bp, Artificial Sequence
  Description of Artificial Sequence: Synthetic polynucleotide
tataaaaagaattataaaatattgttgaaaaaaattagataatagtygggygyggtgttttatgtttgtaattttagtagtttgggaggtygagttgggyggattaygaggttaggagatttagattatttyggttaatayggtgaaatttyggtgaaatttygtttttattaataatataaaaaaattagtygggygtgg

SEQ ID NO: 15214 - DNA, 201 bp, Artificial Sequence
  Description of Artificial Sequence: Synthetic polynucleotide
attattgttaaaaattaaattgggtygggygyggtggtttaygtttgtaattttagtattttggggggtygaggttggyggattaygaggttaggagatygagattattttggttaatayggtgaaattttatttttattaaaaatataaaaaattagtygggygaggtggtaggtatttgtagttttagttattygggag

SEQ ID NO: 15215 - DNA, 201 bp, Artificial Sequence
  Description of Artificial Sequence: Synthetic polynucleotide
tttgttttgattttgtttgtgggtgtygggatatttgggtgtagagggtttgtgtttagttagaagygatttttgtttttttttgygtaggygttggtgygttygtygygtgtgygtggttygtgtgtygttgtttyggtttgygtttttatatgtgtaggaaaggataygtygtttgtttttaygttttttgtgattttt

SEQ ID NO: 15216 - DNA, 201 bp, Artificial Sequence
  Description of Artificial Sequence: Synthetic polynucleotide
gaggttgaggtaggagaattatgtgaattyggaaggyggagtttgtagtgagtygagatygygttattgtattttagtttgggygatagagygagatttygttttaaaaaaaaaaaaaaaaaaaaaaaaagtgatttgggtygggygyggtggtttaygtttgtaattttagtattttgggaggtygaggagggtagatta

SEQ ID NO: 15217 - DNA, 201 bp, Artificial Sequence
  Description of Artificial Sequence: Synthetic polynucleotide
tattagttaggtatggtagtatatgtttgtaattttagttattygggaggttgaggtaggagaatygtttgaattygggaggtggagattgtagtaagtygagttygtgttattttattttagtttgggtaagagygaaattttattgggaaaaaaaaatttatagtttaggtygggygyggtggtttaygtttgtaattt

SEQ ID NO: 15218 - DNA, 201 bp, Artificial Sequence
  Description of Artificial Sequence: Synthetic polynucleotide
ggttagtttttygttyggttagtygttttattygggaggtgaggggygtttttgttyggtygtttttattgggaagtgaggagtttttttgttyggttaygatttygtttgggaggtgtgtttagtagtttattggggatgggttatgatgataatggyggttttgtggaatagaaaggygggaagggtggggaaaaaatt

SEQ ID NO: 15219 - DNA, 201 bp, Artificial Sequence
  Description of Artificial Sequence: Synthetic polynucleotide
attggttaaagagtattgtgggttttyggaagtatttgtttttttattagttgtaaatyggaatgataattagtttttaggttttggtttttgaatgtaygttgygaaygatgtattgttttggttttatggtaggggttggggaggttygttttattttgtatttygattygggtttaaagttgagtttgaagggttttt

SEQ ID NO: 15220 - DNA, 201 bp, Artificial Sequence
  Description of Artificial Sequence: Synthetic polynucleotide
ttygttattaygttyggttaattttttgtatttttagtagagayggggttttatygttttagttgggatggtttygattttttgatttygtgatttgttygtttyggttttttaaagtgttgggattataggygtgagttatygtattyggttttttttttttttttttttttttaagatagagttttattttgttgttta

SEQ ID NO: 15221 - DNA, 201 bp, Artificial Sequence
  Description of Artificial Sequence: Synthetic polynucleotide
atttyggaaagtataggaggttatgttttagtgtggttttttttttttgggtttaagttaaggtttttatygtgtttgtyggtttttygggtttttgygyggtggattttggatttttttgtttygttttgttttagggtttttgtatttgttgttatygyggtttggaaygttttttttttgaaattttgtgatttttat

SEQ ID NO: 15222 - DNA, 201 bp, Artificial Sequence
  Description of Artificial Sequence: Synthetic polynucleotide
tgtgtttataagaatattagttattggatttagggtttatttaatttagtatgattttattttaatttgattatatttgaaaagatttttggtygggygyggtggtttatgtttataattttattattttgggaggtygaggtaggtggattatttgaggttaggagttygagattagtttggttaatatggggaaatttt

SEQ ID NO: 15223 - DNA, 211 bp, Artificial Sequence
  Description of Artificial Sequence: Synthetic polynucleotide
tttagtttttaggaygtgttttttatggttttttttgyggtgtggttaygttyggatttttttggtattttttatttgtttygtaygatttgttttgygygatttgtttygtaaggtyggggggagygtttttttttttygygattttttattttttttyggtattygtttatttygttgtttaggttttttgttttttyggttttagggc

SEQ ID NO: 15224 - DNA, 201 bp, Artificial Sequence
  Description of Artificial Sequence: Synthetic polynucleotide
gtgygygtatttattgatttgygtttattgtttggtattttttagtgagatgaatygggtattttagatgtaaatgtagaaattattygttttttttgtygtttaygttgggagttgtagatyggagttgtttttattyggttattttggttttttttttygaaaagagtattttttaattaagaagatggttttggttgt

SEQ ID NO: 15225 - DNA, 201 bp, Artificial Sequence
  Description of Artificial Sequence: Synthetic polynucleotide
atttagtggattttatatyggggttgtaggtggagttgtttgttagttttgygtygtgtgtttatattttttagtttttgggtggtygatgggattgggygtygtggagtagggggtggtattygttygggaggtttgggyggtataggagtttatggagtgggtgggaggtttaggtatggtgggttgtaggttttgagt

SEQ ID NO: 15226 - DNA, 201 bp, Artificial Sequence
  Description of Artificial Sequence: Synthetic polynucleotide
gatatgtataggttatttaagagaatgatygatttttggttattyggtgtttgtttgttgyggtggygttgtgtygggtttaggggttttagggattttygtygtgttgttagttttggaattttagtggggatttgttgtgtggaaattttyggataatagttttttttatggagaatttaygtttttataatgttatta

SEQ ID NO: 15227 - DNA, 201 bp, Artificial Sequence
  Description of Artificial Sequence: Synthetic polynucleotide
ttatttttttatatttgtagagygttttattttttgtaaygtttatttgygaaattgttgygttaggttaggagtattttaagagygagaggtagaygtygtttgattttttattttgataggggatttttttatttggtagtgttaatattyggtttttaygtattttttatggaggattattaggttagtttatgggag

SEQ ID NO: 15228 - DNA, 201 bp, Artificial Sequence
  Description of Artificial Sequence: Synthetic polynucleotide
ttttggtagagttagtattygattttttttgttyggagatttaggygayggtgtygtgtgatttttgatttygyggatgaggaaggtagagagagagygygtagatayggaggtyggygttgaggttgagggagttatattyggtygtaagtttgagggagggaagtygggtgyggaaatagtttagygggtttagaagtc

SEQ ID NO: 15229 - DNA, 201 bp, Artificial Sequence
  Description of Artificial Sequence: Synthetic polynucleotide
tygttgttaygtttagttaattttttgtattgtttagtagagayggggttttatygtgttagttaggatggtttygattttttgattttgtgatttgttygtttyggttttttaaagtgttgggattataggtatgaattatygtattyggttaatttagtggttttgaggaggattygttaggagttttgtaaaatgttt

SEQ ID NO: 15230 - DNA, 201 bp, Artificial Sequence
  Description of Artificial Sequence: Synthetic polynucleotide
atyggatggaygtttgttgttgttttatyggggtygtgtggggagtygagtgygaggtttgttyggatttygagtttttggagttygttagtttgtgttygygggggttgggtttygttagtygggattttttgtttggtygattattttataaaggtgyggttggggaaggggttaggtttttggaaggatggggagggg

SEQ ID NO: 15231 - DNA, 201 bp, Artificial Sequence
  Description of Artificial Sequence: Synthetic polynucleotide
ttataggtgtgagttattyggtttttttttttttttttttttttttttgagaygaagttttatttttgttttttaggttggagtgtaaaggygtaatttyggtttattataatttttatttttygggtttaggtaatttttttgttttaatttttggagtagttgggattataggtgtttgttattaggtttggttaattt

SEQ ID NO: 15232 - DNA, 201 bp, Artificial Sequence
  Description of Artificial Sequence: Synthetic polynucleotide
attattyggtttagtaggtagaggygtaggaatatggggatggatagtagtaygtttaygtyggtttyggttatygagggygygtaygtgaaggttagtygygtygtttaygtgaagyggtagtggtygggtatygggtgaatggygtatattgttagttttagygagatgaggaataygygttygtaggttatggygatg

SEQ ID NO: 15233 - DNA, 201 bp, Artificial Sequence
  Description of Artificial Sequence: Synthetic polynucleotide
gtagttttagttattttaaaggtagaggtgagaatygtttgaattyggaaggagtaggttttagtgagttgaggttatgttatttttttttagtttgggygatagagaaagattttgtttagaaaaagtaaattatgggagtyggygtyggygagygtygttygggaggtagyggttggaggagyggaygggtttygyggg

SEQ ID NO: 15234 - DNA, 201 bp, Artificial Sequence
  Description of Artificial Sequence: Synthetic polynucleotide
gaggttgaggtaggagaatggygtgaattygggaggyggagtttgtagtgagtygagatttygttattgtattttagtttgggygatagagygagatttygttttaaaaaaaaaataaaaataaaaataaaataaaataaaaaatgagttgggtatgatggtataagtttgtggttttagttatttaggaggttgaggtgg

SEQ ID NO: 15235 - DNA, 201 bp, Artificial Sequence
  Description of Artificial Sequence: Synthetic polynucleotide
gtagtttaataattttgygttgtaaatttaaatattttatatattattagatattaaaaataaagatttatgttgttygtttttayggagtgaggatttygttgattttatattyggttatgaatttgtttgaggtttattagttgaaygttttyggttaagaaagttygtygagtgggggyggtttttaaattattattt

SEQ ID NO: 15236 - DNA, 201 bp, Artificial Sequence
  Description of Artificial Sequence: Synthetic polynucleotide
gtgtattttggtttattataatttttattatattygttttttttaggtttaagtgatttttttattttagtttttttagtagttgggattataggtgtayggtattatgatyggttaatttttgtattttttgtagagatgggattttgttatgttatttaggttggtttygaatttttaagttaaagtaattygtttgtt

SEQ ID NO: 15237 - DNA, 201 bp, Artificial Sequence
  Description of Artificial Sequence: Synthetic polynucleotide
ttttatttttattaaaaatataaaaaattagttaggygtggtggtaygttttgtaattttagttattygggaggttgaggtaggagaattgtttgaaygygggttggggaggttgyggtgagtygagattgtattattgtattttagttygggtgatagtgtaagattttattttaaaaaaaaaaaaaatttgttaattta

SEQ ID NO: 15238 - DNA, 201 bp, Artificial Sequence
  Description of Artificial Sequence: Synthetic polynucleotide
taygtattatttatatgagtttttagtaggtttyggttttaaataggtatatgygtatttttttagttttttattgggattttttygttaagttaygttygatgtttttgtttatagttatgagttgtagtaagatgtttaggttyggtgttagygtgygtagtaygtgtgttagtatygtggaatttttgtygttygagg

SEQ ID NO: 15239 - DNA, 201 bp, Artificial Sequence
  Description of Artificial Sequence: Synthetic polynucleotide
tggtattttggaaggtygaygtgggggtattatttgagattaggggttygagattagttttgygaaygtgatgaaatttygtttttattgaaaatttaaygattagtygggggtggtggtgtatgtttgtaattttagttatttaggaggttgaggtaggagaatygtttgaattyggaaggtggaagttgtaatgagtyg

SEQ ID NO: 15240 - DNA, 201 bp, Artificial Sequence
  Description of Artificial Sequence: Synthetic polynucleotide
ttgaggtgggtygggygyggtggtttaygtttgtaattttaatattttgggaggtygaggggggtggattatttgaggtgggttyggygtggtggtttaygtttgtaattttaatattttgggaggttgagaggggtggattatttgaggtgggtygggygyggtggtttaygtttgtaattttaatattttgggaggtyg

SEQ ID NO: 15241 - DNA, 201 bp, Artificial Sequence
  Description of Artificial Sequence: Synthetic polynucleotide
ggggtttyggttaggggtgggtgaggttggtgtttttttaggttttttttagttataggtagtaggtgttatgggagttttgtyggtatttttttttttygttagggttttggtttatttgatggygtagtttttttttaaggtgtgtatyggygtagatattgtgtaggaagttaggttgatgtagayggtttttaagtc

SEQ ID NO: 15242 - DNA, 201 bp, Artificial Sequence
  Description of Artificial Sequence: Synthetic polynucleotide
aaagttgtttaaagttttataatgagttgatttatygggaataggaggaggtttygtygttagtttttgtgttatatttggtatttygtttaggtttatyggagaggagattataygttttttttttagtttttttaatttttttagttaagataggtgttattatttattttagttttagtgtgttttgagtgtgtygga

SEQ ID NO: 15243 - DNA, 201 bp, Artificial Sequence
  Description of Artificial Sequence: Synthetic polynucleotide
tatttttttgttttagtttttygagtagttgggattataggygttygttattgygttyggttaattttttgtatttttttagtagagayggggttttatygtggtttygattttttgatttygtgattygtttatttyggttttttaaagtgttgggattataggygtgagttatygygttyggtygtgtgtgttttttaa

SEQ ID NO: 15244 - DNA, 201 bp, Artificial Sequence
  Description of Artificial Sequence: Synthetic polynucleotide
gtaygtggtagtaggatttatttttggggtgtttygggtyggtgaatttatatttttttaygttaatggttygtagtatttgtagttygtgggtygagtyggttgtggggggtttattggtggtaggggtattattggggagagtggyggayggttgggttggyggyggtggaggtagtaggggttttgttatgtggtygt

SEQ ID NO: 15245 - DNA, 279 bp, Artificial Sequence
  Description of Artificial Sequence: Synthetic polynucleotide
ggtggaagagttgatagtaaggggagtggttaaayggaggyggggtttggaagggggygtggtttgygggtttttgggtygttyggtttttttaggtgtygtagyggaaggtttggagtagaggttgttttttygtttaagtattttttgggtgagtttatatttttggygygagtaygatttttttttttagggaaggtygggtttttygttggggttygattygattttttttttttatttttttttttttgttttatatttagygagtttaggttt

SEQ ID NO: 15246 - DNA, 201 bp, Artificial Sequence
  Description of Artificial Sequence: Synthetic polynucleotide
ttataygggaggttgaggttagagaatggygtgaattygggaggtagagttygtagtgagtygagatggtattattgtattttagtttgggygatagagygagatttagttttaaaaaaaaaaaaaaaaaaaaaggaaaatttaggtttttttttagattgaaatttttgtaaatataatttatgattttatagtagttag

SEQ ID NO: 15247 - DNA, 201 bp, Artificial Sequence
  Description of Artificial Sequence: Synthetic polynucleotide
ttttgttgtaaaagaagtgtttatagaatttttatttttttttattattattattttttgagatagagtygttgtygttygggttggagtatagtggtaygatttyggttaattgtaagtttygtttttygggtttaygttatttttttgttttagttttattttttygtttygtttygtttygtttygtttygttttyga

SEQ ID NO: 15248 - DNA, 201 bp, Artificial Sequence
  Description of Artificial Sequence: Synthetic polynucleotide
gtttttttaatattttgaaatttaaagtgtgatagttttagaggattattaatataagtattatttgaaaatttgttagaaatgaagaattaggtygggygyggtggtttaygtttataattttagtattttgggaggtttagatgggaggattaygatattaggagatygagattattttggttaatayggtgagatttc

SEQ ID NO: 15249 - DNA, 201 bp, Artificial Sequence
  Description of Artificial Sequence: Synthetic polynucleotide
tatggtgaaaatttgttttttttaaaaatataaaaattagttaggygtagtggtatgygtttgtagatttagttatttgggtggttgaggtaggagaatygttggaattygggaggtygaggttgtagtgagtygagatygtattattgtattgtagtttgggtgatagaataagattttaatttaaaaataataataata

SEQ ID NO: 15250 - DNA, 201 bp, Artificial Sequence
  Description of Artificial Sequence: Synthetic polynucleotide
tttgtttaggaaatgtatataggagttggttattttgtgttttgagttttttyggaggtgttggatttttagagagagaaatagagataygtaagagggygaagatgttttagtggtgatatattggggagtttygtttaygattygtttaygatyggtatatttaatttgttttayggaattttattttatagttyggtt

SEQ ID NO: 15251 - DNA, 201 bp, Artificial Sequence
  Description of Artificial Sequence: Synthetic polynucleotide
ygttaggataagygagggtggtttgagttttgtgtttatatggygtatgtygtttagtagatgatattgayggtygtaaaygtygtagggaatatagygygggygtaaatgttaatggtgtttgygtygatgggtttgagtygggtayggatgtttttttggttttttgagygggttgtttttttttttttygtttttttt

SEQ ID NO: 15252 - DNA, 201 bp, Artificial Sequence
  Description of Artificial Sequence: Synthetic polynucleotide
tttttgttgagagtggatttygtgygtgtgttttttaggaayggtgataagtaygayggygattgggttygggatyggygttagggatayggggtgttgygttgygtygayggttttatttataaggtattygggggygygyggtatttgttgtttagagggtataggtttygtggtgggtagggygygtggggtgtatgg

SEQ ID NO: 15253 - DNA, 201 bp, Artificial Sequence
  Description of Artificial Sequence: Synthetic polynucleotide
gatattatattttatatttttttattttttttgattyggagtttygttttgtygtttaggtttgggtgtagtagygygatttyggtttattgtaagtttygtttttygggtttatattatttttttgttttagtttttygagtagttgggattataggtgttygttattaygttyggttaattttttgtatttgtagtaga

SEQ ID NO: 15254 - DNA, 201 bp, Artificial Sequence
  Description of Artificial Sequence: Synthetic polynucleotide
tttttttttagaaagtatatgaataggtygggtayggtggtttaygtttgtaattttagtattttgggaggtygaggygggtggattaygttagaagatygagattattttggttaatayggtgaaatttygtttttattaaaaatataaaaaaaaataagtygggygtggtagtgggygtttgtggttttagttattttg

SEQ ID NO: 15255 - DNA, 201 bp, Artificial Sequence
  Description of Artificial Sequence: Synthetic polynucleotide
gtgtgagagttatatgttaggaataagaggtatgtygagaggtggtygggtayggtggtttaygtttgtaattttagtattttaggaggaygaggtgggyggattataaggttaggagatygagattattttggttaatatggtgaaatttygtttttattaaaaatataaaaaattagtygggygtggtggygggygttt

SEQ ID NO: 15256 - DNA, 203 bp, Artificial Sequence
  Description of Artificial Sequence: Synthetic polynucleotide
ttttataaygttttttattatttgtgagtayggtttgtaaygtggaagatataattttatttgattttttttagatttttttgttgttttagttttttaygygttagttttygggtttttattttaaatttttttaggtttagaatgttttgttttaaattttatygatattatttgygaaattgtagttttttatgattaat

SEQ ID NO: 15257 - DNA, 201 bp, Artificial Sequence
  Description of Artificial Sequence: Synthetic polynucleotide
attatatatggtygggygygatggtttaygttatygagtgattgttgtaattttagtattttgggaggtygagaygggaggattaygaggttaggagatygagattattttggttaatayggtgaaatttygtttttattaaaaaaataaaaatattagtygggygtggtggtgggygtttgtagttttagttatttggga

SEQ ID NO: 15258 - DNA, 201 bp, Artificial Sequence
  Description of Artificial Sequence: Synthetic polynucleotide
agttttagttattygggaggttgaggtaggagaatggygtgaattygggaggyggagtttgtagtgagtygagatygygttattgtattttagtttgggygatagagygagatttygttttaaaaaataaaaataaataataataataattttagatattttataataatttttaggtataagagtttttatgagagtagg

SEQ ID NO: 15259 - DNA, 201 bp, Artificial Sequence
  Description of Artificial Sequence: Synthetic polynucleotide
tgggggttttagaatttttgtagtttatatttttttggtttttttttgggtagtttggaggttttygatttttyggagtttttggtatttgagttttttygtgaaagttygttygagaagggtttttgtttygggtttggtagattggagtttttttttgggttttttttttttttttttgggtgttttgtttttygttaa

SEQ ID NO: 15260 - DNA, 201 bp, Artificial Sequence
  Description of Artificial Sequence: Synthetic polynucleotide
aygygttattaygttyggttaatttttgtatttttagtggagayggggttttattatgttggttaggttggttttaaattttttatttygtgattygttygtttyggttttttaaagtgttgggattataggagtgagttattatgttyggttttaattttagttttatagatgaaaaaayggaagtttaggattagtgat

SEQ ID NO: 15261 - DNA, 201 bp, Artificial Sequence
  Description of Artificial Sequence: Synthetic polynucleotide
aagtagtatttggttttttgtttttgtgttaatttatttyggataatggtttttagttgtatttatgttgttgtaaaggatyggattttgttttttttaygattgtatagtattttatggtatatatatatatatattatatttttttaattyggtttatttatgtttttgttgttgtgaatagttttgtaatgaatatgt

SEQ ID NO: 15262 - DNA, 201 bp, Artificial Sequence
  Description of Artificial Sequence: Synthetic polynucleotide
ttaaataaatgtygggtgttagggtygttgagtaagataataggtygtaaggaygtagtagaggattttyggtygatttgttgygatggagtgagttagyggtgaggtttgaaggtttttgttttatttttttttyggagtagaggtyggggagggtgttgggtgttagtatagagtagagggtyggttayggaattgggg

SEQ ID NO: 15263 - DNA, 201 bp, Artificial Sequence
  Description of Artificial Sequence: Synthetic polynucleotide
gggagtgtagtggygygatttyggtttattgtaattttygtttttygggtttaagygatttttttgttttagtttttttagtaggtaggattatagtygygtgttattatattyggttaattttttgtatttttagtagagattgggttttattatgttagttagaatggttttaatttattgatttygtgattygttygt

SEQ ID NO: 15264 - DNA, 201 bp, Artificial Sequence
  Description of Artificial Sequence: Synthetic polynucleotide
ttagtagaaatagggttttattatgttggttagaatggttttgattttttgattttgtgatttgttygtttygtttttttaaagygttgggattataggygtgagttattgygttttgtttattgtttatttttttttgttygttttattttgattgtyggggttttggatattatataaagagttagttggagagtgaga

SEQ ID NO: 15265 - DNA, 201 bp, Artificial Sequence
  Description of Artificial Sequence: Synthetic polynucleotide
ggaatgtagtggygttatttygttgattgtatttttygtttttyggttgtaagtgatttttttgttttagtttttttagtagttgggattataggygtgygttataatatttagttaatttttgtatttttagtagagaygggtttttattaagttggttaggttggtttygaatttttgatttygtgattygtttgtttt

SEQ ID NO: 15266 - DNA, 201 bp, Artificial Sequence
  Description of Artificial Sequence: Synthetic polynucleotide
tatttyggttttttaaagtgttggtgttataggtgtgaattatygtattyggtttgttttttattttattatttatttattttttttgagattgagtttygtttttgttgtttaggttggagtgtgtagtggtttaatttyggtttattgtaaatttygtttttygggtttaagygatttttttgttttagttttttgagt

SEQ ID NO: 15267 - DNA, 3238 bp, Artificial Sequence
  Description of Artificial Sequence: Synthetic polynucleotide
ttttttttyggattggtttaatttttttttttaagtttggtattttgtttttttttagygggggatattttgtygttttggggtgttygtygtgggygtygtaygattttgggtgtaagttagagattttataaataygtygggttttgygtagyggttttygggaaggtattgttattygtgggagggttyggttygttattttttattttttgttgttttaaygttattttttaagtttggygtttttttttttttttttggaggttttygtgttgttttggggtgttttttgtgggygagatatataatttgggtgtaagttagggatttygygattatttttggttyggygtaggggtggttatttttgggaygatattatttygttatttttttttttggattgtttttattattttttttaattttggygttttgtattttttttttagtggtttttttgtygttttgtggtgtttttygtgggtgagataygtattyggggtgtaagatagggattttaggaygttttygggtttattgtagaggttgttgggaaggtagtgtygttygtgagaggattttagtattttygtttttttttttyggggttgttttaatttttttttttaagattgaygtgttgtttttttttttygggaatttttttgttgttttgtggtgttygtygtgggtaagatatttattttgggtgtaagttagggaattaataattttygtatgttyggtaaaggggttgtyggtaaggtattgttattygtgggattattttagtttygttgtttttttttttaggttatttaaaygtttttatttaagtttggygttttgttgttttttygygggggattttttgttattttggggtgtttttygtgggygagataygtatattgtgtgtaagatagggatttygygattttttygggattggtataggggttgtagggaaggtattgttattygtgaaaggattttagtttygttttttttttttttgggttgttttaaygtttttttttaagtttggtattttgttttttttttttyggggtttttttgttgttttggggtgttattygtgggygaggtaygtattttgggtgtaaattagggattttaagatttttagggttaggygtaggggatgtygggaagttattgtttttygtggaaagtttttttttggattgttttaaagtttttttttaagtttggtattttgtttttttttttyggagttttttttgtagttttygygtgtatatttaggygagataygtattttgttgtaagatagggattttaaattttttygtttgggttaggtttaggggttgtygggaaggtattgtggtttgtgggaygattatagtttagtygttgtttttttttggttggtttaaygtttttttttaagtttgatatgttgtttttttttttygggggttttgttgttatttttaygtgtatttygtgagtaagataggtattttgggtttaagttaggggttttatygtttatttgggttttatttagaggttgtygggaaggtattgtttttagtggaaatttttttttyggattgttttaaygtttttttttaagttyggygttttgtttttttttattyggggattttttatygtattgyggtgtttatygtgggtaygataygtatttygggtgtaagttagggattttataattattttaggttygatgtaggggttatyggataagatattgttgtttttgggatgatatyggtttgttttaattttattttttaattttggagttttgtattttttttttgggggtttttttgttgttttgtggtgttattygtgggygagatatataatttgggagtaagttagagattttaygatatttttgggtttattgtagaggttgttaggaaggyggtgttattygtgggaggattttagttttattatttttatttyggggtygttttaattttttttttaagtttgaygtgtttttttttttttygggaatttatttgtygttttggggtgtttttttgagygagataygtattttgggtgtaagttayggattttaggattattttggtttagygaaggggttgttaggaaggtattgtygtttgtgggagaaatttagygtygtygtttttttttaygggttattttaaagtttttttttaagtttgaggtgttgttttttttttttaggggtttatttgtygttttggggtgttttttatgggygaaataygtattttgggtgtaagatagggattttaygattttttygggtttagygtagggattgttaggaaggtattgttattygtaggaggaattygattagtygtttttttttttgtgttgttttagtatttttattaaagtttggttttttgtggygttygttyggyggtttttttgttattttggggtgtttttatgggtgygattygtattttyggtgtaagttagggattttaygattatttygggtttgaygtaggggttgttgggaaggtattgtygtttatgggaygattttagtttgttaygttttttttyggattgttttaattattttttttaattttggygttttatatttttttttyggtggtttttttgtygttttgtggtgtttttygagggygagataygtattttgggtgtaagttaaggattttatgaygtttttaggtttattatagatgttgtygggaagatagtgttattygtggtaggattttagtattttttttttattttyggggttgttttaaygtttttttttaagtttgaygtgttgttttttttttttgggaatttatttgtygttttggggtgtttttygtggaattttgggtgtaagtttgggatataataattttttygggtttggtaaaggggttgtygggaaggtatygtggttygtgggaagtttttttttggattgttttaaagtttttttttaagtttggygttttgttttttttttagggggtatttttgtygttttggggtgttttttygtgggygygataygtattttgggtttaagttaggaattttaygataatttygagtttggygtaggggttgtygggaaggtattgtygttygtgtgaygatygttgtttgttgttttttttttygtgttgttttaaygttattttttaygtttggygtttta

SEQ ID NO: 15268 - DNA, 201 bp, Artificial Sequence
  Description of Artificial Sequence: Synthetic polynucleotide
tgttatttygttyggttaattttgtgtgtgtgtgtttttagtagagayggggttttatygtgttagttaggatggtttygattttttgatttygtgattygtttttttyggttttttaaagtgttgggattataggygtgagttatygygttyggttttttgtatattattttttgagatattttgaggtaatagttttgg

SEQ ID NO: 15269 - DNA, 201 bp, Artificial Sequence
  Description of Artificial Sequence: Synthetic polynucleotide
ygaygtttaagtattygagaayggtgattaattattttggagagtatttgtaaaggyggttttttagtygtttttttyggaagtygtagtttttgtgttygttttygtattttgtatatttgttgaggtggggygtgttaattattaaattattaatgagtgatggtttaaattgtaggtagagtaatgaatagatggtgg

SEQ ID NO: 15270 - DNA, 201 bp, Artificial Sequence
  Description of Artificial Sequence: Synthetic polynucleotide
tgtaataagttygggggttgattttgggygtgtygggggygagggggttayggtggagayggataygggygtggggyggtygagatttgtayggtttagygggtatyggtattgyggggttttygtttttagaggattattgttttatattgaagtttttttttttgtatatttagagtttgatgtatttttaattatygt

SEQ ID NO: 15271 - DNA, 201 bp, Artificial Sequence
  Description of Artificial Sequence: Synthetic polynucleotide
gggygtggtggygggtatttgtaattttagttattygggaggttgaggtaggagaatggtgtgaattygggaggtggagtttgtagtgagtygagatygygttattgtattttagtttgggygatagagygagatttygttttaaaaaaaaaaaaaaaaaaaaagaagaagttagagtaaggaggtagaatgatttttagg

SEQ ID NO: 15272 - DNA, 201 bp, Artificial Sequence
  Description of Artificial Sequence: Synthetic polynucleotide
ggttagggygtaygyggygttggggttyggggggatgttygttgtttyggtygtattttggttaygtatatttttgggggyggttgttttattgtagggygygggggyggagttyggtttaagaagagyggtaaagggygggyggttttggyggtttagtttagggttygggagtgtttgggggttttttygtttyggggg

SEQ ID NO: 15273 - DNA, 201 bp, Artificial Sequence
  Description of Artificial Sequence: Synthetic polynucleotide
aaaaagtaaaaaataaaaattagtyggttatagtggtgggtgtttgtaattttaattgttygggaggttgagttaggataatagtttgattttgyggggyggaggttgttatgagttaaaatygtgttattttattttaggttgggygtaagagygagattttgttttaaaaaaaaaaaaaaagttttatgtygggygtyg

SEQ ID NO: 15274 - DNA, 201 bp, Artificial Sequence
  Description of Artificial Sequence: Synthetic polynucleotide
taggygtgagttatygygttyggttatttttgataattttattttaaatagtgataggttaaaagttaagagyggatgttttagtatttagttttttagygttttgttagttattttaagtttgtygataggagtttgattttattgattttttttttttttagagttatgtttattttttaaaattttaagaagttgttt

SEQ ID NO: 15275 - DNA, 201 bp, Artificial Sequence
  Description of Artificial Sequence: Synthetic polynucleotide
atttyggaggttgaggtaggagaatggygtgaaygygggaggtggagtttgtagtgagtygagatygygttttttgattttaggtgatttgtttgttttygtattyggttaatttgtttttgtatatataatttttttattgtttaatatattttagggttttttaattttatattttatattttagtttttttaatagat

SEQ ID NO: 15276 - DNA, 201 bp, Artificial Sequence
  Description of Artificial Sequence: Synthetic polynucleotide
tagggtttygttgtgttggtygggtyggtttttagtttttaatygygagtgattygttaatttyggtttttygaggtgtygggattgtagayggagtttygtttatttagtgtttaatggtgtttaggttggagtgtagtggygtgatttyggtttattataatttatattttttagtygtttgttttggttttttaaaat

SEQ ID NO: 15277 - DNA, 201 bp, Artificial Sequence
  Description of Artificial Sequence: Synthetic polynucleotide
aggtygaggtaggyggattataaggttagaatatygagattattttgggtagtaygatgaaatttygtttttattaaaaaatataaaaaattagtygggygtggtggtyggygtttgtagtattagttgtttaggaggttgaggtaggagaatggtatgaatttgggaggyggagtttgtagtgagtygagattgygttat

SEQ ID NO: 15278 - DNA, 201 bp, Artificial Sequence
  Description of Artificial Sequence: Synthetic polynucleotide
ggtgggtgggttatgaggttaggatattgagattattttggttaatatggtgaaattttgtttttattaaaaatatagaaaattagttgggtatgttggtgggtatttgtaagttttagttatttgggaggttgaggtaggagaatggtgtgattttgggaggtggagtttgtagtgagttgagattatgttattgtattt

SEQ ID NO: 15279 - DNA, 208 bp, Artificial Sequence
  Description of Artificial Sequence: Synthetic polynucleotide
tttatttatttatttttgagatagagttttgttttgttgtttaggttggagtgtagtggtgtgattttggtttattgtaagttttgttttttgggtttatgttatttggttttagttttttgagtagttgggattataggtgtttgttattatgtttggttaattttttatatttttagtagagatagggttttattatgttagttag

SEQ ID NO: 15280 - DNA, 201 bp, Artificial Sequence
  Description of Artificial Sequence: Synthetic polynucleotide
ttttttttttttttttttttttttttgagatggagtttggttttgttgtttaggttggtgtgtagtggtttattgtattttttgttttttgggtttaagtgatttttttattttagttttttaagtagttggggttaaaggtttgtgttattatgtttggttaattttttgtattttagtagagatggggttttattgtgt

SEQ ID NO: 15281 - DNA, 201 bp, Artificial Sequence
  Description of Artificial Sequence: Synthetic polynucleotide
ttgtggtgtaattttagtttattgtaatttttgttggtagggtttaagtaatttttttgttttagttttttgagtagttgggattataggtatgtattatgatgtttggttaatttttgtatttttagtagagatggggttttattatgttgattaggttggttttgaatttttgattttaggtgatttgtttattttggt

SEQ ID NO: 15282 - DNA, 201 bp, Artificial Sequence
  Description of Artificial Sequence: Synthetic polynucleotide
gtgggttttaaatattttataagttagagtaattagaatagtatggtattggtataaagataggtatatagtttgtttggttttgttttgttttgttgttgtgtttgttagttatgagttttatgtagttaaataaaggtttttttgtggatttttggttgaggttaagaattggtttttgtttaaatatgatttttagaa

SEQ ID NO: 15283 - DNA, 201 bp, Artificial Sequence
  Description of Artificial Sequence: Synthetic polynucleotide
tattgatttggaagaatggaatgatagttagtgaggtatatttagtaattgagtatggttagtgttggtttttggtttttgagatattgatttatgtagtgttaggatttggggattttttaggtgtaaattagaggttaaatagtttgtttggttaatgggttagaatttgtggttgaatagaggttttgttgtggtttt

SEQ ID NO: 15284 - DNA, 201 bp, Artificial Sequence
  Description of Artificial Sequence: Synthetic polynucleotide
ttatttttgggggatgagaggagggatggtgagaggatatttttaaagaatatttggggttggggaagaattttttatgattttgttttataatttggttgtttattttgtattttgttgtatgttgtttggtttttggttatgttatgtgaatttttggagttattttttttttttttttatttggatggagagggtttt

SEQ ID NO: 15285 - DNA, 201 bp, Artificial Sequence
  Description of Artificial Sequence: Synthetic polynucleotide
tttaatagatatgaaaattgaaggttgggtgtagtggtttaagtttgtaattttagtattttgggaggttgaggtgggtggattatgaggttaggagattgagattattttggttaatatagtgaaattttgtttttattaaaaatattaaaaattagttgggtgtggtggtgggtgtttgtagttttagttatttgggag

SEQ ID NO: 15286 - DNA, 201 bp, Artificial Sequence
  Description of Artificial Sequence: Synthetic polynucleotide
ttgaatagttgggattataggtgtttgttattgtgtttggtttattttttgtgtgtttttagtagagatggggttttattgtgttagttaggatggttttgattttttgattttgtgatttgtttgttttggttttttaaagtgttgggattataggtttgagttattgtgtttggttaaaataattaatttttgtgttaa

SEQ ID NO: 15287 - DNA, 201 bp, Artificial Sequence
  Description of Artificial Sequence: Synthetic polynucleotide
atggatttttgtggtgagtgttatagtttttaaaggtggtgtgtttggagtttgttttttttgatgtttggatgtgtttggagttttttttggtgggtttgtggttttgttggtttaggagtgaatttgtagatttttgtggtgagtgttatagtttataaaggtagtgtggatttatagagtgaatagtagtaagattta

SEQ ID NO: 15288 - DNA, 201 bp, Artificial Sequence
  Description of Artificial Sequence: Synthetic polynucleotide
tattaaaaataaagaaggaggttgggtgtggtggtttatgtttgtaattttagtattttgggaggttgaggtgggtggtggattatgaggttaggagattgagattatggtgaaattttgtttttattaaaaatataaaaaattagttgggtgtggtggtgggtgtttgtagttttagttattgggaaggttgaggtagga

SEQ ID NO: 15289 - DNA, 201 bp, Artificial Sequence
  Description of Artificial Sequence: Synthetic polynucleotide
gttaagatagtgttattgtattttagtttgggaatagagtgagattttgttttaaaaaaaaattattgatatatataaatatttgtgaaattggttgggtgtggtggtttatgtttgtaattttagtattttggggggttgaggtgggtgtattataaggttaggagattgagattattttggttaatatggtgaaatttt

SEQ ID NO: 15290 - DNA, 235 bp, Artificial Sequence
  Description of Artificial Sequence: Synthetic polynucleotide
gtttatagtttttagagagagtgatgtagaagatgggtgatttttgtatttttatttgaggtattgggtttattttattagggagtgttagatagtgggtgtaggttagtgggtgtgtgtattttgtgtgagttgaagtagggtgaggtattgttttattttggaagtataaggggttagggagtttttttttttagttaaagaaaggggtgatagatggtatttggaaaattgg

SEQ ID NO: 15291 - DNA, 201 bp, Artificial Sequence
  Description of Artificial Sequence: Synthetic polynucleotide
ttttgagtagttggtgttataggtgtttattattatgtttggttaattttttgtatttttagtagagatagggttttattatgttagttaggatggttttgattttttgattttgtgatttgtttgttttggttttttaaagtgttgggattataggtatgagttattgtggttggttttaattatgtatttttatttatt

SEQ ID NO: 15292 - DNA, 201 bp, Artificial Sequence
  Description of Artificial Sequence: Synthetic polynucleotide
ttgattatttaggtgtgtttgttatttttttttttgatttggaaagggaattttttgtttttttgtgttttttaagtgaggtaatgttttgttttgttttggtttgtgtatggtgtatgtatttattgatttgtgtttattgtttggtattttttagtgagatgaatttggtattttagatggaaatgtagaaattatttg

SEQ ID NO: 15293 - DNA, 201 bp, Artificial Sequence
  Description of Artificial Sequence: Synthetic polynucleotide
tgggttgttgggtgtttgggttgtttttttattgtttaggataaattttattttgttttattggttgatggtttgttggggagtttgtgggtgagttggtgtttgtaggtgtgtttttttgttgatatgttttttgtgattagttgtttttgtttttttttattgatgtgttttttttgttttttagtagtttttgttttt

SEQ ID NO: 15294 - DNA, 201 bp, Artificial Sequence
  Description of Artificial Sequence: Synthetic polynucleotide
tatttggtttggagggttttatgtttattgagttttgttgattgttagtatagtagtttgagattaaattgtaaggtagtagtgaggttgggggaggggtgtttgttattgtttaggtttgtttaggtaaataaagtagttgggaagtttgaattgggtggagtttattatagtttaaggaggtttgtttgtttttgtagg

SEQ ID NO: 15295 - DNA, 201 bp, Artificial Sequence
  Description of Artificial Sequence: Synthetic polynucleotide
ttgttttgtagtttgattttagattgttgtgttagtaattagtgagattttgtgggtgtaggattttttgagttaggtgttggatataatttttaggtgtgttgttttttaagtttgttggaaaagtgtagtattttggtgggagtgatttgattttttaggtgttttttgttatttttttttttgattaggaaagggaat

SEQ ID NO: 15296 - DNA, 201 bp, Artificial Sequence
  Description of Artificial Sequence: Synthetic polynucleotide
agtgatgtagaagatgggtgatttttgtatttttatttgaggtattgggtttattttattaagggagtgttagatagtgggtgtaggttagtgggtgtgtgtattgtgtgtgagttgaagtagggtgaggtattgttttatttgggaagtataaggggttagggagttttttttttgagttaaagaaaggggtgatggatg

SEQ ID NO: 15297 - DNA, 201 bp, Artificial Sequence
  Description of Artificial Sequence: Synthetic polynucleotide
tattaggatattttggttgtagagaggagttatttattgtgagttttttttgagttgttttattatttagtaaagtttttttttattttgtttattttttgtttgtttatgtatgttattgtttttgggtgttgaatttgttaaatggtggaggtgaaagagttttaatataaatagagttgaaatatgttttttgtttgt

SEQ ID NO: 15298 - DNA, 201 bp, Artificial Sequence
  Description of Artificial Sequence: Synthetic polynucleotide
gttggagtgtaatggtatgattttggtttattgtaatatttgttttttgggatttagtaatttttttgttttagttttttgagtagttgagattataggtgattattattatgtttggttgatatttgtatttttagtagagatggggttttattatgttggttaggttggttttgaatttttgattttaggtgatttgtt

SEQ ID NO: 15299 - DNA, 201 bp, Artificial Sequence
  Description of Artificial Sequence: Synthetic polynucleotide
tattgttggtattagtatttggaagaggggaatattgtggtttttgaaaatttggagttgttagtaattgaggagttttaaggagtgagatgggggtgttgttttattatttttttatttttgtagttggtagttttgttagtggtgggggttgggttgaggggtggtggtatattaggggggtggtggtatatattatag

SEQ ID NO: 15300 - DNA, 201 bp, Artificial Sequence
  Description of Artificial Sequence: Synthetic polynucleotide
gttttttggtattattagtatttgggttttttggagtggaagtggttggttggggatatgtagtttatagaggtttagatgaaaatttggttttaaaattgttagatgaaatatgaatggtaaatgtaggatttatagttgaatagtttttttttggggtttttttatgtgtttgggttttttatttattgttttttggtt

SEQ ID NO: 15301 - DNA, 207 bp, Artificial Sequence
  Description of Artificial Sequence: Synthetic polynucleotide
attagagtagaggggtttttttattttttgtttagttttttgatttggttttttattttttaggaaatatattttggtttgaggtttatttgttgttgttgttgttggaggagttggttttgaatgagttggtgatgttgatgtgtttggtatgtggttttagttttaaggatgtgttggtttgttggttgtaggggttataggagt

SEQ ID NO: 15302 - DNA, 201 bp, Artificial Sequence
  Description of Artificial Sequence: Synthetic polynucleotide
atattaggggaagaagatataagtgttggttatttataggagtattttagtagaaggatatgttgataggtatttggaagttagtaggttgtggattagtgggaggaggtggaggttggtttgggtagttaggggagagttggggttgttgagtattttaattttaggggaaaattattttttttttggttgttttatggg

SEQ ID NO: 15303 - DNA, 201 bp, Artificial Sequence
  Description of Artificial Sequence: Synthetic polynucleotide
ttgattttttaggtgtgtttgttatttttttttttgatttggaaagggaattttttgattttttgtgttttttaagtgaggtagtgttttgttttgttttgtgtatggtgtatgtatttattgatttgtgtttattgtttggtattttttagtgagatgaaattggtattttagatggaaatgtagaaattatttgttttt

SEQ ID NO: 15304 - DNA, 201 bp, Artificial Sequence
  Description of Artificial Sequence: Synthetic polynucleotide
ttatgttttaggtatattgatatttttgtattggttttttttaggaggttatgttttaggtatatgggtatttttatattgattttttttagtaggttatgttttaggtatatgggtatttttatattgattttttttgggaggttatgttttaggtatatgggtatttttatattggttttttttaggaggttatgtttt

SEQ ID NO: 15305 - DNA, 201 bp, Artificial Sequence
  Description of Artificial Sequence: Synthetic polynucleotide
gtttttttgtttggttgtttagtttgggaagtgaggagtgtttttttttggttgttattttgtttaggaagtgaggagtgtttttgtttggttatttattgtttgggatgtggggagtatttttgttaggttgtgattttatttgggaattgaggagtgtttttgttttgttattattttatttgggaggtgaggagtgtt

SEQ ID NO: 15306 - DNA, 201 bp, Artificial Sequence
  Description of Artificial Sequence: Synthetic polynucleotide
gagggagatgtggggtgggaattggggttgtttgtggtaggttagagtaagttttgggtggatatggttttggtgggttttatattttgagtagttggttgttttattagttttgggtagtgaggggtttattatttgggatagtagttgtggagggtgtgttgagttttttagtagtgttagtttgttggtgttgtgttc

SEQ ID NO: 15307 - DNA, 201 bp, Artificial Sequence
  Description of Artificial Sequence: Synthetic polynucleotide
tttgattaaaaataaataaatatggttgggtgtggtggtttaggtttgtaattttagtattttgggaggttgaggtggtggattataatgttaggagattgagattattttggttaatatggtgaaattttatttttattgaaaatataaaaaattagttgggtgtggtggtgggtatttgtagttttagttatttaggag

SEQ ID NO: 15308 - DNA, 201 bp, Artificial Sequence
  Description of Artificial Sequence: Synthetic polynucleotide
tggttagggggtatttttagatgtatagaagttttggaggttatggtaagtttgtaattgggatttgtttttaggtttatatgtgtagttttttagttgtgtaatttttttaaatggagtagttttggtgtgggtggggtttgggttggtagtgggggtggggttggtagtgggggtggggttagttgggggaggaggggg

SEQ ID NO: 15309 - DNA, 201 bp, Artificial Sequence
  Description of Artificial Sequence: Synthetic polynucleotide
tatggtgaaattttatttttattaaaaatataaaaattagttgggtgtggtagtgtatgtttgtaattttagttatttgggaggttgaggtaggattattgtttgaatttggaaggtggaggttgtagtgaattaagagagtggttttgtattatagtttgaatgatagagtaagattttattttaaaataattaattaat

SEQ ID NO: 15310 - DNA, 201 bp, Artificial Sequence
  Description of Artificial Sequence: Synthetic polynucleotide
attatgtttggttaattttttttttttgtatttttagtagagatggggttttattgtgttagttaggatggttttgattttttgattttataatttgtttgttttggttttttaaagtgttgggatgataggtgggagttattgtgtttggtttaatttagtgtttgatatttgaagatgatttgggttagaggagattgt

SEQ ID NO: 15311 - DNA, 201 bp, Artificial Sequence
  Description of Artificial Sequence: Synthetic polynucleotide
agtgagttgttgatgttagtgagatgttaggttggatttagtaagttgttgatgttagttagatgtagagtagagaatgttggttaaagagtagttaggtggtgtttgtttggttgaagtttagttttggagaggtaggttttgtattaggatgtggaggttttggggttatgaaatttttagggtgagagataaaggtag

SEQ ID NO: 15312 - DNA, 380 bp, Artificial Sequence
  Description of Artificial Sequence: Synthetic polynucleotide
tttttttttttttttttagatggagtttagttttgtttttatgttgtagggtagtggtgtggttttggtttattgtaatttttgttttttgggtttttgtgatttttttgttttagttttttgagtagttgggattataggtatatgttattatgtttagttaatttttgtttgtttgtttatttatttattattatttttgagatggagttttgttttgttattaggttggagtgttattggagtgtaatggtatgattttggtttattgtaatttttgttttttgggtttaagtaatttttttgttttagttttttgtgtaattgggattataggtatgtgttattatttttagttaattttttgtattttagtagag

SEQ ID NO: 15313 - DNA, 201 bp, Artificial Sequence
  Description of Artificial Sequence: Synthetic polynucleotide
gagtgtaatggtgtgattttggtttattgtaagttttgttttttgggtttatgttatttttttgttttagttttttaagtagttgggattagaggtgtttgttgttatgtttagttaattttttgtatttttagtagagatggggttttattgtattagttaggatggttttgattttttgattttgtgatttgtttgttt

SEQ ID NO: 15314 - DNA, 201 bp, Artificial Sequence
  Description of Artificial Sequence: Synthetic polynucleotide
tatagggtgttgaaattaagttatttagggagtttgtagattttattttttttggtgagagagtttggtggggagtattttatttaatgtagggaatagtgttattgtggtttttattttttggttttaagtgatttatttgttgtagttttttaagtagttgggattataggtgtgtgttattatgttgggttagttttt

SEQ ID NO: 15315 - DNA, 201 bp, Artificial Sequence
  Description of Artificial Sequence: Synthetic polynucleotide
ttttttttttgggggtttttttatgttttatgtagtttatggtgtggggtttattggttttggtggggtggaaggttttatgttgttgttgttttatgttgttggtggtgggggtttgttgggggttgggaggaaggtaaataggaagggtttattggggagagggtgggggagtatgttatagttgttgtagtttgttgt

SEQ ID NO: 15316 - DNA, 201 bp, Artificial Sequence
  Description of Artificial Sequence: Synthetic polynucleotide
tttaggtgtgtttgttatttttttgatttggaaagggaattttttgattttttgtgttttttaagtgaggtaatgttttattttgttttggtttatgtatggtgtgtgtatttattgatttgtgtttattgtttggtattttttagtgagatgaatttggtattttagatggaaatgtagaaattatttgttttttgtgtc

SEQ ID NO: 15317 - DNA, 201 bp, Artificial Sequence
  Description of Artificial Sequence: Synthetic polynucleotide
ggttgtagtgtagtggtgtgatttttgtttattgtaagtttttttttttgggtttatgttatttttttgttttagtttttgagtagttgagattataggtgtttgttattatatttggttaattttttgtaaaaaatttaaaaaaaaaattaaagataaaatgggtttggtagtatgatattttttatttttaattatttg

SEQ ID NO: 15318 - DNA, 201 bp, Artificial Sequence
  Description of Artificial Sequence: Synthetic polynucleotide
ttttgttttttttaagtgttggttaggttgagaaataaagggatagagtataaaagagggaaattttaaagttgggtatttgggggagatattatatgttggtaggttttgtgatgtttttgagttgtaaaattagtaagtttttattagggatttttaaaaggggagggagtgtatgaatagggtgtgggttatagagat

SEQ ID NO: 15319 - DNA, 201 bp, Artificial Sequence
  Description of Artificial Sequence: Synthetic polynucleotide
agtagtgtttttataaataggtgtgaaaattgagtatgttttgggttggttagttgaattattgtgtgtagagagggagttttggttgtataggtatagtggtggattatgtttttatatatgttgtttgtatagaaaatggagaataagtttttttttgggttgggtttttaagattataataataagagtttgttaaag

SEQ ID NO: 15320 - DNA, 201 bp, Artificial Sequence
  Description of Artificial Sequence: Synthetic polynucleotide
ttttaggggttttaaattggagttttatttttaggatttataaaattttagatatagttaggatttgttagggagattagttttttttggtagtttgggtgttgttgtttttaatatatagtgataatttggaatttatttttagagttatttagaaatatgttttggagatggtgttttttgaaagatttttatttttaa

SEQ ID NO: 15321 - DNA, 201 bp, Artificial Sequence
  Description of Artificial Sequence: Synthetic polynucleotide
ggatgtttggttatatttgattttttatttttgggtatggaggtttgtttgtagaggtttgggtttgggtataaagggagagagaggtttttattgttttgtaggggttgaaatgtagattgtgtatttttggtgattttggggatttttttttgattattaggatttttttggattttagggtttttgttttgtttaggt

SEQ ID NO: 15322 - DNA, 201 bp, Artificial Sequence
  Description of Artificial Sequence: Synthetic polynucleotide
ttagtagagatggggttttattgtgttagttaggatggttttgattttttgattttgtgatttgtttgttttggttttttaaagtgttgggattataggtgtgagttattgtgtttggttatttattttttttaagagatggttgatatgattttaatttttttaaatttttgaagatttgttttgtgatttagtatgtga

SEQ ID NO: 15323 - DNA, 568 bp, Artificial Sequence
  Description of Artificial Sequence: Synthetic polynucleotide
aggtggagttgtttgttagtttggtgttgtgtgtttgtattttttagtttttgggtagttgatgggattgggtgttgtggaataggggttggtgtttgttggggaggtttgggttgtataggagtgtatggtgggggtggaggtttaggtatggagggttgtaggttttgagttttgtttggtggggaggtagttaaggtttagtgagaagttgagtatagtagttgttggtttaggtgttaagttttttattgtttgggttggttggttgttttgagtgtggggtttgttaagtttatgtttatttggaatttgagttggtttgtaagtgtagtttgtagttatggtttttgtttatgtttttttttttatatttatttgtaagttgagggagttggttttagttttgtttagtttagaaaggggtttttatagtgtagtgatgggttgaagggttttttaaatgtggttagagtgggtgttaaggttgaggaggtgttgagagggagtgagggttgtgagggttgttagtatgttgttattttttatttttgtgtttgtatattaa

SEQ ID NO: 15324 - DNA, 201 bp, Artificial Sequence
  Description of Artificial Sequence: Synthetic polynucleotide
ttttttttttttttttttttttttttttttttgagatggatttgtgttttgttgtttaggttggagtgtagtggtgtgatttttgtttattgtaagttttgttttttgggtttatgttatttttttgttttagttttttgagtagttgggattataggtatttattatgatgtttagttaattttttgtatttttagtaga

SEQ ID NO: 15325 - DNA, 201 bp, Artificial Sequence
  Description of Artificial Sequence: Synthetic polynucleotide
attttagagaagtttatgggagttttagggagagttttttttgtgaagggtagggtattttggaatgggtttgttgagtttgtttttatttggaatttatgtttgtttataagtgttttatatagttttggtttttatttgtgtttttttttttatatttttttgtaagtagagggagttaattttggttttggttagttt

SEQ ID NO: 15326 - DNA, 201 bp, Artificial Sequence
  Description of Artificial Sequence: Synthetic polynucleotide
ggataaagaaaatgtggtatatggttgggtatggtggtttatgtttgtaattttggtattttgagaggttaaggtgggtagattatgaggttaggagattgagattattttggttaatatgatgaaattttatttgtattaaaaaatataaaaaattagttaggtatggtggtgggtgtttgtagttttagttatttggga

SEQ ID NO: 15327 - DNA, 201 bp, Artificial Sequence
  Description of Artificial Sequence: Synthetic polynucleotide
ttgtattttagtttgggggatagagtgagattttgttttaaaaaagaaagaaaaaaatgtttttttttttttgttttttttgatttttattttgttttgtgggttttttattaataattgtttgtgtttgatttgggtgttttttttattataattttttttttaggtgtatgtttttataataaagtttattttatggtt

SEQ ID NO: 15328 - DNA, 201 bp, Artificial Sequence
  Description of Artificial Sequence: Synthetic polynucleotide
ttagttttatttatgtgttatttatggataagggtaattattagtagtagtgattatgtgtgttaggtatttgtaggtttttttttgttttttgaattatgtgttatgtttagtttagggatgataaattgaggtgtatgagtaggtgagaagatgaatagtgtatttgggtaaggttgttagtttttttgtgtttttgtg

SEQ ID NO: 15329 - DNA, 201 bp, Artificial Sequence
  Description of Artificial Sequence: Synthetic polynucleotide
ttattattgatatttattttttttttatttatagtatttgtatgtatgttaagaattggattggtaagagtgagtttagtaatgagtttattattatggtggatgaggtaggtatgtgggattgggtggaattttgttttagaggagtttgggagttaatttttgagggtttagatgtttaaatgtagaagtagatttttg

SEQ ID NO: 15330 - DNA, 201 bp, Artificial Sequence
  Description of Artificial Sequence: Synthetic polynucleotide
gtgggaggtgtgtaagtgatatattgaggggtttaggtagtagtttttatatgttgttaggttagagtagttttgggttatgtgggtgtttttagttgttgttgtaggtggaggtatgttggttttttaaggatgtgatagtggttggatttttatgattattgtttggttattagagggtaagttttagggttagttaag

SEQ ID NO: 15331 - DNA, 201 bp, Artificial Sequence
  Description of Artificial Sequence: Synthetic polynucleotide
gggttggttttgggttgtttggggtttttgtgatttttatatttattttttttgtagggtgtggtgttgggttttatggtgggttttatgatttatgggtggtgttaattttagtttttggatatgatgatgtggtgtttgattttgtttttttgtgaggttttggttaagttaattatgttggtggatgttgatgttgag

SEQ ID NO: 15332 - DNA, 201 bp, Artificial Sequence
  Description of Artificial Sequence: Synthetic polynucleotide
taatattgtttgtaaatgattgaattggtttttgatttttttagagaagattgtgtatagatatttggatgattttattagttaggaaattgagtggggtgggatgtatttgtagtagtggttggatagtgtgattatgtaggatggatggtttagatggttatgttgtagtttattagtagtaggtttttaaggtgatta

SEQ ID NO: 15333 - DNA, 201 bp, Artificial Sequence
  Description of Artificial Sequence: Synthetic polynucleotide
ttggatagtaaatatgtgtgggttttttttgtgttggatagtaaatatgtgtgggtttttttgtgttaaatggtaaatatgtgtgggttttttgtgtgttgaatagtaaatatgtgtgggttttttttgtgtttgatagtaaatatgtgtgggttttttgtgtgttggatgataaatatgtatgggtgttttgtgtgttgg

SEQ ID NO: 15334 - DNA, 201 bp, Artificial Sequence
  Description of Artificial Sequence: Synthetic polynucleotide
gttttattatgttggttaggttggtttttttaatttttgattttgtgatttatttattttggttttttaaagtgttgggattataggagtgagttattgtgtttggttgagatttttatgttattattttatgaagtttttggtataatgtttgatatatagtaggtatttgataagtggagtttttattgttgttttttt

SEQ ID NO: 15335 - DNA, 201 bp, Artificial Sequence
  Description of Artificial Sequence: Synthetic polynucleotide
gagttaggtgtgggatatagttttgtggtgtgttgttttttaagtttgttggaaaagtgtagtatttgggtgggagtgatttgattttttaggtgtgtttgttatttttttttttgattaggaatgggaattttttgattttttgtgttttttgagtgaggtaatgttttgttttgttttggtttgtgtatggtgtgtgta

SEQ ID NO: 15336 - DNA, 201 bp, Artificial Sequence
  Description of Artificial Sequence: Synthetic polynucleotide
ttttttggagttaattgtgtttttattattttaaatagagtagttgggattgggtgttgtgttttatgtttataattttagtattttgtgaggttgaggtgggtagattatgaggttaggagattgagattattttggttaatatggtgaaaatttgtttttattaaaaatataaaaaattttttgggtgtggtggtgggc

SEQ ID NO: 15337 - DNA, 201 bp, Artificial Sequence
  Description of Artificial Sequence: Synthetic polynucleotide
ttgatagagtgaaatggtggtggtggttgggatgatgttgttgggtttgttataggtgggtgggtaggtgttgggttaggtgatggaggaggtggtaggtggtaattttttgtttatgttgttgattgtttgtgtttttatttttagtttggtttatttgttttgttttgttgttggttatttggtttagttgattgtagg

SEQ ID NO: 15338 - DNA, 201 bp, Artificial Sequence
  Description of Artificial Sequence: Synthetic polynucleotide
gtgaaattttgtttttattaaaaatattaaaaaaattagttggtgtggtggtaggtgtttgtagttttagttatttgtaaagttgaggtaggagaatggtgtgaatttgggaggtggagtttgtagtgagttgagattgtgtttttgtattttagtttgggtgatagagtgagattttgttttaaaaaaaaagtagtttgg

SEQ ID NO: 15339 - DNA, 201 bp, Artificial Sequence
  Description of Artificial Sequence: Synthetic polynucleotide
tttttatttttgtttttgagatggagttttatttttatttaggttggagtgtagtagtatgatttgggtttattgtaatttttgttttttgggtttagttgatttttttgttttagttttttaagtggttggaattataggtatatattattatatttggtaaatttttttttttttttttttgtatttttagtagattgt

SEQ ID NO: 15340 - DNA, 201 bp, Artificial Sequence
  Description of Artificial Sequence: Synthetic polynucleotide
tatggtgaaattttgattttgttaaaaatataaaaattagttgggtgtggttgtgagtatttgtaattttagttatttgggaggttgaggtaggagaattgttagaatttgggaggtggaggttgtagtgagttaagatggtattattgtattttagtttgggtaatagagtgagattttattttaaaataaaaaaaaata

SEQ ID NO: 15341 - DNA, 201 bp, Artificial Sequence
  Description of Artificial Sequence: Synthetic polynucleotide
atttgttttaaggattggaagaggaaaattaaaaatattatttgaaaggttggatgtggtggtttatatttgtaattttagtattttgggaggttaaggtgggtggattatgaggttaggagtttgagattagtttggttaatataatgaaattttgtttttattaaaaatataaaaattagttgggtttggtggtaggta

SEQ ID NO: 15342 - DNA, 201 bp, Artificial Sequence
  Description of Artificial Sequence: Synthetic polynucleotide
tgtagtggtataatttttgtttttgtaattttttttttttggttttaagtgatttttgtgttttagtttttaagtagttgggattataggtttgagttttgtttggttaattttttttatatttttagtagagatggggttttattatgttggttaggttggttttgaatttttgattttaagtgatttgtttattttggt

SEQ ID NO: 15343 - DNA, 201 bp, Artificial Sequence
  Description of Artificial Sequence: Synthetic polynucleotide
aatatgggtggttttgtgtaggatgggggttttagggttgtttgagttggaggatagtttgtagtttttattgtttgtagttgaagtgtgttgtgagattgttgtaggggtttgggttatttttgttttgggggattttaaaaagttgagttatatttatgttgaaatttttattgaggataattatgtattatatagatt

SEQ ID NO: 15344 - DNA, 201 bp, Artificial Sequence
  Description of Artificial Sequence: Synthetic polynucleotide
agtttttgttgattttagtatgagttgtttatatatatttaaggttggtagtatagtggtatatgtggtaaaattgagtaggtgtggatgggaagggagtgtattagtttgtgtgtgaaggttatatttaggggtggagggaggggagaaatatttttgttgtatttgtagtgttttattttttttagtaatttaaaatgt

SEQ ID NO: 15345 - DNA, 234 bp, Artificial Sequence
  Description of Artificial Sequence: Synthetic polynucleotide
ttttgttgatgtagtgtttgttgttgtttttggatgattttagtggtgaagtggtgtattatgttataggtttgttggaatttttgtttatttgttgagtggtagtaaatgaagttgaggtagtggtgtaagtgatattggtgttggatagatagagtgtttagtttaatgatagtggagatataattatttatttttttgttaaggagaaggggatttatgagtgtagttttt

SEQ ID NO: 15346 - DNA, 201 bp, Artificial Sequence
  Description of Artificial Sequence: Synthetic polynucleotide
tagtttttttatttgtgtagtgggtgtaatgttgatgattgtttttgggaagttagatggtgtttgggaggtgttgagttggggttgatatagagtgagtgttttgtgaagtatttgggttttgtgatgtttttaagtttatagatgtattatgttatgaggaatatatttgggttggtgatgttggagataagggatttt

SEQ ID NO: 15347 - DNA, 201 bp, Artificial Sequence
  Description of Artificial Sequence: Synthetic polynucleotide
tagtgagtatagattgtgttattgtattgtagtttgggtgatagaagtgaaaagaaatattgttttaaaaaaaaaataggagggaggagttaagatggttgaataggaatagttttggtttatagtttttagtgtgagtgatgtagaagatgggtgatttttgtatttttatttgaggtattgggtttattttattaggga

SEQ ID NO: 15348 - DNA, 201 bp, Artificial Sequence
  Description of Artificial Sequence: Synthetic polynucleotide
gatgaaattttgtttttattaaaaatataaaaatttagttgggtgtggtggtggatgtttgtagttttagttatttaggaggttgaggtaggtgaatggtgtgaatttgggaggtggagtttgtagtgagttgagattgtgttattgtattttagtttgggtgatagagtgagattttgttttaaaaataaaataaaatta

SEQ ID NO: 15349 - DNA, 201 bp, Artificial Sequence
  Description of Artificial Sequence: Synthetic polynucleotide
gtgagtgtggggtttagttggttgttttaagtattggtatataggtaggttttaggtagggtttgtagttggattaggtatgttattttgaagggaatgtggtggtattttaagaggggtgtttagattttgaagttttggaaggggtgattttatttgttaattagtttttttagttttgttatttgtagttttagggat

SEQ ID NO: 15350 - DNA, 201 bp, Artificial Sequence
  Description of Artificial Sequence: Synthetic polynucleotide
gtgtggttttttagttagggtagtttgaaatttaggaatgttttaaggttattttgtgggaattgtggtgttagggtttttgaatatttttttgttttttgagttgagttgttttatttgttttttaaatgggttttgggaggaaggtttgtgtgtttttttaaggtgaggagttattgatgtaaattttttgtaaggatt

SEQ ID NO: 15351 - DNA, 201 bp, Artificial Sequence
  Description of Artificial Sequence: Synthetic polynucleotide
ggggatttagtttatgtgtgtgggggttgtgtgtgtttgttttgtttgtttatgtatgttatatatgtgagagtttatagtgagggtagtttttatatgtgatggtttagaggagtgagtattttaggttttttagtatgtttttgtgttgattttttgtagtattgttgggagttatgtgagtgtttatgtttgtgtgtg

SEQ ID NO: 15352 - DNA, 201 bp, Artificial Sequence
  Description of Artificial Sequence: Synthetic polynucleotide
tttatttgttttttgtttttttttttgttggatttgaggtgttgtttttgttgtgttgtttttgtgttatgttatgttatgttatgttatgttatgttatgtttttatgttatgtttatgttatgtttttattttttgtttatagggaaatgggttttggtgatgtgagggtgtttgttgtgtttggtgtttttatagggg

SEQ ID NO: 15353 - DNA, 201 bp, Artificial Sequence
  Description of Artificial Sequence: Synthetic polynucleotide
agtttttaaagttttaatttttttttttttttttttttttttttttttttttttttgagttggagttttattttgttgttaggttggagtgtagtggtgtgattttagtttattgtaatttttgtgttttgggtttaagggatttttttgttttagttttttgagtagttgagattgtaggtatgtgttattatgtttagt

SEQ ID NO: 15354 - DNA, 201 bp, Artificial Sequence
  Description of Artificial Sequence: Synthetic polynucleotide
ttgtaggatagttttaaaaaggaaggttattttttttttgtttattattgtagtttgttaattaattagaaggtaggtgttgagatagtaataattagttgatagttgtggaggattgttgggatttttatagagtttgataagtgggattatagttattattagttattgagaagagtgttttttatttatagagtgtaa

SEQ ID NO: 15355 - DNA, 201 bp, Artificial Sequence
  Description of Artificial Sequence: Synthetic polynucleotide
ttaaatttttagagggtttattgtaagattttttttgggtttgaaagtttaagatgaataatttttttttttttaggtttagttttaaggtgtaatttgtgttagtagggtgtgttagtagggtgtgttagtagggtgtgttagtagggtgtgttagtagggtgtgttagtagggtgtgttagtagggtgtgttagtaggg

SEQ ID NO: 15356 - DNA, 686 bp, Artificial Sequence
  Description of Artificial Sequence: Synthetic polynucleotide
attatgttttagtttttttggttgtttttatttttaaatatttgaaaaatagaggtgttgggtgtgaggtggagagatgtataggtttggttttggttttgttttttgtttgttttaaagggtaaggtttttttgttttgtgttttgtttttgttttatttaggttttgttattatgtttgggggttttatttgggattggtttttgttttgtgtagtaaatttggaagtggattatgtggagtaaaggttttattgaggtgtgtgagttttgttttgttttgtattaagtttgtattttttaggtttttggtatttttgtttttgggatgtggggtttttatagatttggaaatttttgtttgtttttttttatttagagtaaattgagatgtttataagagtttggaagttgtttttttttgggtttgaagttgtttggaggttggttttgtttttggtttttttgttatagggtaatgtatatattttttattgtatagtttttttgtttaaaattttgttgatttattttgttttttgttttttaaagtttttatttgtgtgttggatttttgttttgggtgttttttagtttttgttggttttttttggagtgtagtgttggggttttagttttggggaggttgggttttttgtttggttttgggagtttgtaggtgttat

SEQ ID NO: 15357 - DNA, 201 bp, Artificial Sequence
  Description of Artificial Sequence: Synthetic polynucleotide
aggttggtagattatgaggttaggagattgagattgttttggttaatatggtgaaattttgtttttattaaaaatataaaaattagttgggtgtggtggtgtgtttttgttttagttgttggggaggttgaggtaggagaatggtgtgaatttgggaggtggagtttgtagtgagttgagattgtattattgtattttagt

SEQ ID NO: 15358 - DNA, 201 bp, Artificial Sequence
  Description of Artificial Sequence: Synthetic polynucleotide
tattgtaagttttgttttttgggtttatgttgttttgttgattttgtgatttgttttgttttggttttttaaagtgttgggattataggtgtgagttattgtgtttggttaatagtttttaatattaattatttagagtgtgtaataatttggaaaagggtttttttttttttttttgtttttagagatagggtttttggt

SEQ ID NO: 15359 - DNA, 201 bp, Artificial Sequence
  Description of Artificial Sequence: Synthetic polynucleotide
tgggagtgatttgatttttaaggtgtgtttgttatttttttttttgatttagaaagggaattttttgattttttgtgttttttaagtgaggtagtgttttgttttgttttggtttgtatatggtgtatgtatttattgatttgtgtttattgtttggtattttttagtgagatgaatttggtattttagatggaaatgtag

SEQ ID NO: 15360 - DNA, 201 bp, Artificial Sequence
  Description of Artificial Sequence: Synthetic polynucleotide
attttataaaaatgaaaattaaataagtataagaatggttatatttgggggaggagttaatatggttgaataggaatagttttggtttatagtttttagtgtgagtgatatagaagatggtgatttttgtatttttaattgaggtattgggtttattttattagggattgttagatagtgggtgtaggttagtgggtgtgt

SEQ ID NO: 15361 - DNA, 201 bp, Artificial Sequence
  Description of Artificial Sequence: Synthetic polynucleotide
tggggttttattttgttagttaggatggttttgattttttgattttgtggtttgtttgttttggttttttaaagtgttgggattatagatttgaattattgtgttgggttagttttgtgggtttttaatgtgtttttttttatttgtaatttagagttagaagaggttagtgttgataggtaggtagtagttatatgaaaa

SEQ ID NO: 15362 - DNA, 201 bp, Artificial Sequence
  Description of Artificial Sequence: Synthetic polynucleotide
ttattaaaaatataaaaaattagttgggtgtggtggtgggtgtttgtaattttagttatttgggaggttgaggtagaagaatggtatgaatttaagaggtggagtttgtagtgagttgggatagtgttattgtagtttagtttgggtgaaagagtgagattttgttttaaaaaaaaaaaaaaaaaaaaaaaaaaaagattt

SEQ ID NO: 15363 - DNA, 201 bp, Artificial Sequence
  Description of Artificial Sequence: Synthetic polynucleotide
ggagggtggtgagggtggggagggggaaggtgggaggttgggtttggtgtatgggggttgggtatattttttttgggtatttttaggataggtgaggaatgtattggttgggattttatttatgagtaggagggtaaggtgtagtttgtgattgatgtggtgtatgttattgtttatgttttttatagtatgtattaggtg

SEQ ID NO: 15364 - DNA, 201 bp, Artificial Sequence
  Description of Artificial Sequence: Synthetic polynucleotide
ttatataagttgtagtttgggtagatgttgtatttgtagtgggtttttattataggtttattgtagttattgtagattatattggggtgtattatgttgtggggtgttttttgagtatatggtgggtggtggttttgttggtatttttttttttttataggaagggtaaagagagttgttagggtgggattttttaaagtt

SEQ ID NO: 15365 - DNA, 201 bp, Artificial Sequence
  Description of Artificial Sequence: Synthetic polynucleotide
tatggggaaattttgtttttattaaaaatataaaaattagtttggtgtggtggtatataattgtaattttagttatttgggaggttgaggtaggagaattgttggaatttgggaggtggagtttgtagtgagttaagattgtgttatgtattttaatttgggtgttgtagtgagattttgtttttaaataaataaagtgtt

SEQ ID NO: 15366 - DNA, 201 bp, Artificial Sequence
  Description of Artificial Sequence: Synthetic polynucleotide
agtaattaataaagtgaagatatggtttattgaagtgtagaaaatatttataagttgggtgtggtagtttatgtttgtaattttagtattttgggaggttgagatatgtggattataaggttaggagattgagattattttggttaatatagtgaaattttgtttttattataaatagaaaaaattagttgggtatggtgg

SEQ ID NO: 15367 - DNA, 227 bp, Artificial Sequence
  Description of Artificial Sequence: Synthetic polynucleotide
agattggttttttttatttaataatatgtattttaatttttagggttgggtgtggtggtttatgtttgtaattttagtattttgggaggttgaggttggtggattatgaggttaggagattaagatgattttggttaatatggtgaaattttgtttttattaaaaatatagaaaataagttgggtgtggtggtgggtatttgtagttttagttatttaggaggttga

SEQ ID NO: 15368 - DNA, 201 bp, Artificial Sequence
  Description of Artificial Sequence: Synthetic polynucleotide
gttttttttttgagttaaagaaaggggtgatggatgtatttggaaaattgggttatttttatttgaatattgtgtttttttgattggtttaaaaaatggtgtattatgagattatattttatatttggtttggagttttgttgattgttagtatagtagtttgagattaaattgtaaggtggtagtaaggttgggggaggg

SEQ ID NO: 15369 - DNA, 201 bp, Artificial Sequence
  Description of Artificial Sequence: Synthetic polynucleotide
atgtagaagatgggtgatttttgtatttttatttgaggtattgggtttattttatttgggagagttagatagtgggtgtaggttagtgggggtatgtattgtgtgtgagttgaagtagggagaggtattgttttatttgggaagtgtaaggggttagggagttttttttttgagttaaagaaaggggtgatagatgtattt

SEQ ID NO: 15370 - DNA, 201 bp, Artificial Sequence
  Description of Artificial Sequence: Synthetic polynucleotide
ggtatttgttattatgtttggttaattttttgtatttatagtatagatggggttttattgtgttagttaggatggttttgattttttgattttgtgatttgtttgtttttgttttttaaagtgttgggattataggtgtgagttattgtgtttggtggaaaggatatttttttatagtatgagtattgaaataaaaaggta

SEQ ID NO: 15371 - DNA, 201 bp, Artificial Sequence
  Description of Artificial Sequence: Synthetic polynucleotide
aattgtgttattggaagttaggaagtaaattttaattttagtattgtttttttttgaaatggagttttgttttgttatttaggttggagtgtagtggtgtgattttggtttattgtaagttttgttttttgggtttattttatttttttgttttagttttttgagtagttgggattataggtgtttgttattatgtttggt

SEQ ID NO: 15372 - DNA, 201 bp, Artificial Sequence
  Description of Artificial Sequence: Synthetic polynucleotide
tttgggtgattgtttgtaatggagggagtgtgtgggttggtttgttagtggagagatttgttttatgttattaggagtttggttgagtattatggtgattgtggttgggtggaaggagatggatgtttatttgtgtaatttgtttttattttttttttaggggttattttagaataaaatgtaatggtttttttttgttta

SEQ ID NO: 15373 - DNA, 201 bp, Artificial Sequence
  Description of Artificial Sequence: Synthetic polynucleotide
ataagttggttgtttggtaggttatattggggtttttaagagtttgggttgtagatgaatttaggtttgttttttttaattagtgtgatttgggtaagttgtgttttttttttgagttttagtttttttattttttaaatgggggtgatgttatttttattgttaggggtttttttgagtgggttataggaaggtgtttag

SEQ ID NO: 15374 - DNA, 201 bp, Artificial Sequence
  Description of Artificial Sequence: Synthetic polynucleotide
tttagtttgggattggtagtatttttatttgtatgttatttttagggatggtaatattgtttattttgagtttagagtagttattatttttggtttttttgttggttttttgggaggttttaggaagatgtgattttttgttaggtatttgtgggtttttttatagttgttggggtggtttttgtttttttaaaattatat

SEQ ID NO: 15375 - DNA, 201 bp, Artificial Sequence
  Description of Artificial Sequence: Synthetic polynucleotide
aaagttattgtaggtaattagaaaagttgtttttattttatggttgtgtttatttgtggtagataggataatggtttaaagatgtttgagatttgtgattgttttattttgtgattgtattattttatatggtaaagaagtttttgtatgtgtgattatgattaaggattttgagatttggagatgatttgggtatttggg

SEQ ID NO: 15376 - DNA, 201 bp, Artificial Sequence
  Description of Artificial Sequence: Synthetic polynucleotide
gtggtggtaggtttgttgtgtttgttttagttagggtttagagttttttggttagtttattgtatttggattttagatgggtgtgttgggtggtgtttgtgttagggaaagagttggtggttggttgagttgttgtgtttttgagtgttgtgtttgttgtgattattggtgtggttgttttttggtaggtttgaaggaatc

SEQ ID NO: 15377 - DNA, 201 bp, Artificial Sequence
  Description of Artificial Sequence: Synthetic polynucleotide
tttttgatattttgtttttatattgtattatttgttggtaattgtttttggatagtggttaggttgtggggaggttggttttggagtttatttttggggtgtatatttttgttaatttttttgaggtggggtataggattgtggtgttgtattatggggatttgttttttttggggttttattatttgttgttatttaagg

SEQ ID NO: 15378 - DNA, 201 bp, Artificial Sequence
  Description of Artificial Sequence: Synthetic polynucleotide
gggtttagaggtattttagtaaatggtttaggaattgtagtattaatttatattgagaaatagaattgttatttaagaaagataattgttggtttaatgtggtggtttatgtttgtaattttagtattttgggaggttgaggttggtggattatgaggttaggagattgagattattttggttaatagggtgaaattttgt

SEQ ID NO: 15379 - DNA, 201 bp, Artificial Sequence
  Description of Artificial Sequence: Synthetic polynucleotide
tatggtgaaattttgtttttattaaaaatataaaaaattagttaggtgtggaggtattttttgtaattttagatatttaggaggttgaggtaggaaaattgtttgaatttgggaggtggagtttgtagtgagttgatattgtattattgtgttttagtttgggtaatagagtaaaattttgttttaaaaaaaaaaaaaaaa

SEQ ID NO: 15380 - DNA, 201 bp, Artificial Sequence
  Description of Artificial Sequence: Synthetic polynucleotide
tatttttttgttttagttttaggagtagttgggattataggtgtttgttataatgtttggttaattttttttgtatttttagtggagatggggttttattgtgttagttaggatggttttgattttttgattttgtgatttatttgttttagttttttaaagtgttgggattataggtgtgagttattgtgtttagttgtt

SEQ ID NO: 15381 - DNA, 201 bp, Artificial Sequence
  Description of Artificial Sequence: Synthetic polynucleotide
gtttatagtttttagtgtgagtgatgtagaagatgggtgatttttgtatttttatttgaggtattgggtttattttattagggagggttagatagtgggtgtaggttagtgggtgtgtgtattgtgtgttagttaaagtagggtaaggtattgttttatttgggaagtgtaaggggttagggagttttttttttgagttaa

SEQ ID NO: 15382 - DNA, 201 bp, Artificial Sequence
  Description of Artificial Sequence: Synthetic polynucleotide
tggtaaaattttatttttattaaaaatataaagatttagtatgggtatggtggtgtatatttgtaattttagttgtttgggaggttgaagtagaagaattgtgtgaatttgggaggtagaagttgtagtgagttaagattatgttattgtattttagtttgggtgatataatgagattttgtttaaaaaataaaataaaaa

SEQ ID NO: 15383 - DNA, 201 bp, Artificial Sequence
  Description of Artificial Sequence: Synthetic polynucleotide
aaattttttatttttttgaggtagagttttattttgttgtttaggttggagtgtagtagtgtgattttggtttattgtaagttttattttttgggtttatgttatttttttgttttagttttttgagtagttgtgattataggtgttttttattatgttgggttaattttttgtatttttagtagagatggggttttattg

SEQ ID NO: 15384 - DNA, 201 bp, Artificial Sequence
  Description of Artificial Sequence: Synthetic polynucleotide
ttttgagtagttgggattataggtgtttgttattatgtttggttaatattttgtatttttagtagagatggggttttattgtgttagttaggatggttttgattttttgattttgtgatttgtttgttttggttttttaaagtgttgggattataggtgtgagttattgtgtttggtttattttttttattttttatagag

SEQ ID NO: 15385 - DNA, 201 bp, Artificial Sequence
  Description of Artificial Sequence: Synthetic polynucleotide
tgagttgagtggagattgtgttattgttttttagtttgggtgatagagggagattttgtgtttaaaaaaaatagatgtaggtaggagttttttttttggtgtttatatttagattgaagaaagtaattgggttgggtttggtggtttagatttgtaattttagtattttgggaggtttaggtagatgtattattttagttt

SEQ ID NO: 15386 - DNA, 201 bp, Artificial Sequence
  Description of Artificial Sequence: Synthetic polynucleotide
ttggagtagtggtaggtggtaagggttgggtggggggttgttttattgggttttttattttttttttttttttttaattttttttttttttttttgagatggagttttgttttgttatttaggttggagtaaagaggtatgattttggtttatagtaatttttgttttttgggtttaagtgatttttttgttttatgtttt

SEQ ID NO: 15387 - DNA, 201 bp, Artificial Sequence
  Description of Artificial Sequence: Synthetic polynucleotide
tgaagggagggatgagagttttattatttaattttaagtttagtggttggtgtttttggaagtggagatatatgtttattggtgtgtgatttatatttatgaaagggaatgtgttttttggaatataggggagttttggttagggaagttgtttttttatttaagagggataaaggtgtgtaaattttagaaattagatat

SEQ ID NO: 15388 - DNA, 201 bp, Artificial Sequence
  Description of Artificial Sequence: Synthetic polynucleotide
aaattatttttgatttgagatataaaaataaagaggttgggtgtaaggtggtttatgtttgtaattttagtattttgggaggttgaggtgggtggattatgaggttagtagattgagattattttggttaatatggtgaaattttgtttttattaaataaaatataaaaaattagttgggtgtggtggtgggtgtttgtag

SEQ ID NO: 15389 - DNA, 217 bp, Artificial Sequence
  Description of Artificial Sequence: Synthetic polynucleotide
ttttgaatgaaattaggaaggagaaagtatgggataatgggtttttgataatgataaaaagagaaaaaataaatagaaaaaagaggagggttggttgggtgtggttaggaaggtgtggttttggttaggagattgagattattttggttaatgtggtgaagttttgtttttattaaaaatataaaaaattagttgggtgtggtggggggtgtttgta

SEQ ID NO: 15390 - DNA, 217 bp, Artificial Sequence
  Description of Artificial Sequence: Synthetic polynucleotide
ttgttatttttttttttgattgggaaagggaattttttgattttttgttttttttaagtgaggtagtgttttgttttgttttggtttgtgtatggtgtatgtatttattgatttgtgtttattgtttggtattttttagtgagatgaatttggtattttagatggaaatgtagaaattatttgttttttgtgttgtttaagttgggagttgtagatc

SEQ ID NO: 15391 - DNA, 201 bp, Artificial Sequence
  Description of Artificial Sequence: Synthetic polynucleotide
tgttggtgggagttaaaatggattaattatataaaaaataatttttaggttgggtgtagtggtttatgtttgtaattttggtattttgggaggttaaggtgggtggattatgaggttaggaaattgatattattttggttaataaggtgaaattttatttttattaaaaatataaaaatttagttgggtgtggtggtgggt

SEQ ID NO: 15392 - DNA, 201 bp, Artificial Sequence
  Description of Artificial Sequence: Synthetic polynucleotide
tggagattttttatttattgtggtagtaaatttgtttgaggtgtttgtatgttttagttttggggttttgggggttgtgtttatagtttttttattttttggtttttatgttagggtttttggtttatattgtgttgttttgttttatatgagattggaaagttatatgtggataatttaggatttatttagggttatata

SEQ ID NO: 15393 - DNA, 201 bp, Artificial Sequence
  Description of Artificial Sequence: Synthetic polynucleotide
gtagggtttgaattttttttttaggagggttagggttgtggttgggtgatgttaggtggggaagatattagaagaggagaaaattaggagtgtaggatgtggtgggagattgggaggttgtagagaggaggtttgaggataggagggaaggaggtggggatagaggttgagggttggaggggttgttgggttttttttggg

SEQ ID NO: 15394 - DNA, 201 bp, Artificial Sequence
  Description of Artificial Sequence: Synthetic polynucleotide
gttattgtgtttggttaatttttttgtatttttttagtagagttggggttttattgtgttagttaggatggttatgattttttgattttgtgatttggttgttttggttttttaaagtgttgggattataggtgttaagttattgtgtttggttgatagttagatttttaaaggtgtttgaatttttttaatgtggaaata

SEQ ID NO: 15395 - DNA, 201 bp, Artificial Sequence
  Description of Artificial Sequence: Synthetic polynucleotide
agtttatgtatggtgtgtgtatttattgatttgtatttattgtttggtattttttagtgagatgaatttggtattttagatggaaatatagaaattatttgttttttgtgttgtttatagtgggagttgtagattggagttgtttttatttggttattttggtttgatttggagtggtatatgtttttaaataattaaatt

SEQ ID NO: 15396 - DNA, 201 bp, Artificial Sequence
  Description of Artificial Sequence: Synthetic polynucleotide
ttggtgagaagttgagtatagtagttgttggtttaggtgttaagttttttattgtttggggttgttggttgttttaagtgtgggttagtttagtttatgtgtatttggaagttgtgttggtgagggagggttgtgagggttgttagtatgttattattttttattgggattataggtgtgagttatggtgtttggttgaag

SEQ ID NO: 15397 - DNA, 201 bp, Artificial Sequence
  Description of Artificial Sequence: Synthetic polynucleotide
ttatgttatttttttgttttagtttgtagttgggattataggtgtttgttattatgtttggttattttttttgtatttttaatagagatggggttttattgtgttagttaggatggttttaatttgttgattttgtgatttgtttgttttggttttttaaagttttgggattgtaggagtgagttattgtgtttggttgta

SEQ ID NO: 15398 - DNA, 201 bp, Artificial Sequence
  Description of Artificial Sequence: Synthetic polynucleotide
tagattggagtgtagtggtatgattttggtttagaatttttgttttatgggtttaagtaatttttttgttttagtttttggagtagttgggattataggtgtttgttattatgttaggttaattttttgtatttttagtagggatggttgattgggtgtggtggtttatgtttgtaattttagtattttgggaggttgagg

SEQ ID NO: 15399 - DNA, 201 bp, Artificial Sequence
  Description of Artificial Sequence: Synthetic polynucleotide
tattttttagatgggatagtggttgggaagaggtgttttttattttttagatgggatggtggttaggtagagatgttttttattttttagatggggtggtggttgggtagaggttgtaattttggtattttgggaggttaaggtaggttgttgggaggtgaaggttgtagtgagttgagattatgttattgtattttagtt

SEQ ID NO: 15400 - DNA, 201 bp, Artificial Sequence
  Description of Artificial Sequence: Synthetic polynucleotide
gatggagttgtttgttagttttggtattgtgtgtttgtattttttagtttttgggtggttaatgggattgggtgttgtggagtagggggtggtgtttgttggggaggtttgggttgtataggagtttatggaaggggtgggaggtttaggtatggtgggttgtaggttttgagttttgttttgtgggaaggtagttaaggt

SEQ ID NO: 15401 - DNA, 286 bp, Artificial Sequence
  Description of Artificial Sequence: Synthetic polynucleotide
gagttaggtgtgggatatagttttgtggtgtattgttttttaagttggtttgaaaagtgtaataattgggtgggagtgatttgattttttaggtgtgtttgttatttatttatttgatttggaaagggaattttttgattttttgtgttttttaggtgaggtaatgttttgttttgttttggtttgtgtatggtgtgtgtatttattggtttgtgtttattgtttggtattttttagtgagatgaatttggtattttagatggaaatgtagaaattatttgttttt

SEQ ID NO: 15402 - DNA, 201 bp, Artificial Sequence
  Description of Artificial Sequence: Synthetic polynucleotide
aggtaaagttgtttgttagttttatgttttgtgtttatgttttttagttgttttatagttgatgggattgggtgttatggagtagggggtggtgtttgttggggaggtttttgttgtataggagtttagggtagtggggggaggtttatatatggtaggttgtaggttttaagttttgttttgtagggaggtagttgaggt

SEQ ID NO: 15403 - DNA, 201 bp, Artificial Sequence
  Description of Artificial Sequence: Synthetic polynucleotide
aggtgggtggattatgaggttaggggtttgagatgagtttggttaatatggtgaaattttgtttttattaaaaatataaaaattagttgggtgtggaggtgtgtgtttgtaattttagatatttgggaggttgaggtaagagaattgtttgaatttgggaggtggaggttgtagtgagttgagatggtgttattgtatttt

SEQ ID NO: 15404 - DNA, 201 bp, Artificial Sequence
  Description of Artificial Sequence: Synthetic polynucleotide
gagtgatgtagaagatgggtgatttttgtatttttatttgaggtattgggtttattttattagggagtgttagatagtgggtgtaggttagtgggtgtgtgtaatgtgtgtgagttgaagtagggtgaggtattgttttatttgggaagtgtaaggggttagggagttttttttttgagttaaaggaaggggtgatggagg

SEQ ID NO: 15405 - DNA, 201 bp, Artificial Sequence
  Description of Artificial Sequence: Synthetic polynucleotide
gtgttgtttgttatttttttttttgattaggaaagggaattttttgattttttgtgtttttggagtgaggtaatgttttgttttgttttagtttgtatatggtgtatgtatttatggatttgtgtttattgtttggtattttttagtgagatgaatttggtattttagatggaaatgtagaaattatttgttttttgtgtt

SEQ ID NO: 15406 - DNA, 201 bp, Artificial Sequence
  Description of Artificial Sequence: Synthetic polynucleotide
atttttatttgaattttgatagtagttattatgtagagttgttaaaatgtatatttttggttgggtgtggtggtttatgtttgtaattttagtattttgtggggttgaggtgggtggattatgaggttaagagattaagattattttggttaatatggtgaaattttgtttttattaaaaatataaaaaaaattagttggg

SEQ ID NO: 15407 - DNA, 201 bp, Artificial Sequence
  Description of Artificial Sequence: Synthetic polynucleotide
ttaggtgttatttgttatttttttttttgatttagaaagggaattttttgattttttgtgttttttaggtgaggtaatgttttgttttgttttggtttgtgtatggtgtgtatatatattggtttgtgtttattgtttggtattttttagtgagatgaatttggtattttagatggaaatgtagaaattatttgttttttg

SEQ ID NO: 15408 - DNA, 201 bp, Artificial Sequence
  Description of Artificial Sequence: Synthetic polynucleotide
tttagtttattgttgtattgtgagagtttttttttgggttggttaaggttagagtttgtttttttagtttgtagggaggtgtggatggagaggtgtgagtgggaatttaggttgtgtatggtgtttgtgggttagttggagttttgggtgggtgtgggtttggtaggttttgtattgggagtagttggttggttttgttag

SEQ ID NO: 15409 - DNA, 201 bp, Artificial Sequence
  Description of Artificial Sequence: Synthetic polynucleotide
ggggagagggattgattttttgtgttttatttttagtttatttaattttagtgtagtttggagattgttattgtgttttttggagggtgatggagtttttgttttgtttaggagtagtttggtttttgggagggtagtttgatttttatggtattgttggtgattttttagtttaggttttggggttgtgagaattttaag

SEQ ID NO: 15410 - DNA, 201 bp, Artificial Sequence
  Description of Artificial Sequence: Synthetic polynucleotide
atgagtgttattgatggtagagttgttttttttatgttttgtggggattgggaagagattgtagggagtgaggtattttatttgtttatttggtagatttgaagattgagatttgagagtttgtagttttgggttatatttttagtgtttggtttagttttttttttatttttttatttgttttttgtagatgaggggttt

SEQ ID NO: 15411 - DNA, 201 bp, Artificial Sequence
  Description of Artificial Sequence: Synthetic polynucleotide
gttgtaattttattgagtgtgtttgtttattagatatttgattttgtaagattgttttttttttttttttttgatggagttttgttttgttgtttaggttgaagtgtagtggtgtgattttggtttattgtaagttttgttttttgggtttatgttatttttttgttttagttttttgagtagttgggattataggtgttc

SEQ ID NO: 15412 - DNA, 210 bp, Artificial Sequence
  Description of Artificial Sequence: Synthetic polynucleotide
ttttgggtttttattttttttttttttttttttttttttttgagatgaagttttattttgttgtttgggttggagtgttgtggtaggattttggtttattgtaagttttgttttttggatttatgttatttttttgttttagttttttgagtagttgggattagaggtgtttgttattgtgttaggttaatttttttgtatttttagtag

SEQ ID NO: 15413 - DNA, 201 bp, Artificial Sequence
  Description of Artificial Sequence: Synthetic polynucleotide
taagttgggtgtggtggtttatgtttgtaattttagtattttgggaggtttaggtaggtggattatgaggttaggagattaagattattttggttaatatggtgagaattttgtttttataaaaaatataaaaaattagttgggtgtttgtagttttagttatttgggaggttgaggtgagagaatggtgtgaatttgggg

SEQ ID NO: 15414 - DNA, 201 bp, Artificial Sequence
  Description of Artificial Sequence: Synthetic polynucleotide
gggttaaagaggaattggaaagggtttggggtagatgtgggtgttatagggtgagttgggttaggttgagaggatttatgggttatgggagtttgtgggtgatggtttggtaggggtttgtggtgggaatagggataaaatatatttaataaattgtttatttagagtaagttgtgtgggtataatggtgagaaaatggtt

SEQ ID NO: 15415 - DNA, 201 bp, Artificial Sequence
  Description of Artificial Sequence: Synthetic polynucleotide
ggtgggtgggttatgaagttaggagattgagattattttggttaatatggtgaaattttatttttattaaaaatataaaaaattagtttggtatagtggtgggtgtttgtagttttagttagtttggaggttgaggtaggagaatggtgtgaatttgggaggtggagtttgtagtgagttgagattgtgttattgtattat

SEQ ID NO: 15416 - DNA, 201 bp, Artificial Sequence
  Description of Artificial Sequence: Synthetic polynucleotide
gtttatgttattttaatagtgggtttttttttggtgagaattggttaatagttattgttttgtttttttagtatgttgtttgattagagagggatagggtggggaggaaaattggggtgttgtgggttgtagttttagttgtaaatatgggagttttttttgatgtttgtggtttgttggtttgaaagggagaaatatgga

SEQ ID NO: 15417 - DNA, 201 bp, Artificial Sequence
  Description of Artificial Sequence: Synthetic polynucleotide
ttatgaatttttgagtttaagtgatttttttatttggttttgtgaagtgttgggattatatgtgtgagttattatgttgggattataggtgtgagttattgtgttgggattatgggtatgagttattgtgttggtttttagtaaatattttattagtatttagtgaattttgggtttttgtggaataggaatgtttgtttt

SEQ ID NO: 15418 - DNA, 201 bp, Artificial Sequence
  Description of Artificial Sequence: Synthetic polynucleotide
aggttgaggttggtggattataaggttaggagattgagattattttggttaatatggtgaaattttgtttttattaaaaatataaaaaaattagttgggtgtggtggtgtgtatttgtagttttagttatttgggagtttgaggtaggagaatggtatgaatttgggaggtagagtttgtagtgagttaaaattgtattat

SEQ ID NO: 15419 - DNA, 201 bp, Artificial Sequence
  Description of Artificial Sequence: Synthetic polynucleotide
aaggagatgtttgggttaggattgaagttttttggaataatgggttgggattttgaggttggtaggggtgtagtgggtattgggtttatgtgtggtttgtgttggttgatgtgggtatataaggggtatagttgttattgggggtttggaggggaggatttagttggggtttggagggttaggattttgtagaaggtttac

SEQ ID NO: 15420 - DNA, 201 bp, Artificial Sequence
  Description of Artificial Sequence: Synthetic polynucleotide
tatggtgaaattttgttttaattaaaagtattaaaattatttgggtatggtggtatatgtttgtaattttagttatttgggaggttgaggtaggagaattgtttgagtttgggaggtggaggttgtagtgagttgtgattgtgttattgtattttagtttgggtgatagagtaagattttattttaataaaaaaattaaaa

SEQ ID NO: 15421 - DNA, 201 bp, Artificial Sequence
  Description of Artificial Sequence: Synthetic polynucleotide
gtgatttttttgttttagttttttgagtagttaggattataggtgtttgtttttatgtttggttaattttttgtatttttggtagagatggggttttattgtgttagtaaggatagttttgattttttgattttgtgatttgtttgttttggtgttttaaagtgttgggattataggtatgagttattgtgtttggtgggg

SEQ ID NO: 15422 - DNA, 201 bp, Artificial Sequence
  Description of Artificial Sequence: Synthetic polynucleotide
agtgaaatttttttttattaaaaatttaaaaaaattagttgggtgtggtagtatgtgtttgtagttttagttatttgagaggttgagataggagaatggtgtgaatttgggaggtggagtttgtagtgagttgagattgtgttattgtattttagtgtgggtgatagagtaagattttgttttaaaaaaaaagaaaataat

SEQ ID NO: 15423 - DNA, 201 bp, Artificial Sequence
  Description of Artificial Sequence: Synthetic polynucleotide
agattatagatgaatttgaattttaagtagtatagatgtgttatatttattattttgttgttgattatttttgggattatattatatttattattttgttgttgattatttttgggattattatggtgggttatgatagtatgttttttttagaaatatgtttgaatagtataagaaaaggatattatttggatttgtgga

SEQ ID NO: 15424 - DNA, 201 bp, Artificial Sequence
  Description of Artificial Sequence: Synthetic polynucleotide
tgttgttatttataagagtttttttttttttgtaattaatggttttgtttttggtttgtttagtaaattgaaattattgaaaaaggattttgttgggagtggtggtttatgtttgtaatattagtattttgggaggttgaggtgggttgattataaggttaggaaattgagattattttggttaatatggtgaaatttagt

SEQ ID NO: 15425 - DNA, 201 bp, Artificial Sequence
  Description of Artificial Sequence: Synthetic polynucleotide
ttagagttaggtgtttattgttaatttggagtgtgtgttttagttttttggggttgattttggttgttgggttagtagtgtgaattttttttttttatatggggtttttaagatatgtgtttgtgtgtgtttgtttttaagatatgtgtgtgtgtatatgtgtgtgtgtgtgtgtgttttatatgaatgatttgagttatt

SEQ ID NO: 15426 - DNA, 201 bp, Artificial Sequence
  Description of Artificial Sequence: Synthetic polynucleotide
gttagtgtttttatggtagtttttgtattgggtttggggtgggggtggggggtggttgtggagtttttggtttttatttagtgtgttttttttatggggtgtattttaaagtgataagatgttttttaggaaatggggaatggatgttaggtttttagggagaggttgaggtagtttgaggtaaaaagggatgggttgagg

SEQ ID NO: 15427 - DNA, 201 bp, Artificial Sequence
  Description of Artificial Sequence: Synthetic polynucleotide
gggtgtttatggagtttttagtttttatttagggtgtgtgttttttttatggggggtattttaaaggggtatgaagttttttgggggatggggatatgatgttaggtttttagtgggatattgagatagttgggggaaaaaagttgggagggtaagaaggttggggtatttttatggaggttagtttttttttagtagttt

SEQ ID NO: 15428 - DNA, 201 bp, Artificial Sequence
  Description of Artificial Sequence: Synthetic polynucleotide
gtatttattgttttgtattaattgtttagtattttttagtgagatgaatttgttattttagttggaaatgtagaaattatttattttttgtgttgtttatgttgggagttgtagattggagttgtttttatttggttattttggttttattttattatattttttttatttagtttattattgatggatatttgggttggt

SEQ ID NO: 15429 - DNA, 201 bp, Artificial Sequence
  Description of Artificial Sequence: Synthetic polynucleotide
gtaggtgttagggagaggtaattttttaaatagataaaaatatttttggttgggtgtggtggtttatgtttgtaattttagtattttgggaggttgatgtgggtggattatgaggttaggagattgagattatttttgttaatatggtgaaattttgtttttattaaaaatataaaaaattagttgggtgtggtggtgggc

SEQ ID NO: 15430 - DNA, 201 bp, Artificial Sequence
  Description of Artificial Sequence: Synthetic polynucleotide
tggttttattatgttagttaggatggttttaattttttgattttgtgatttgtttgttatggtttttgaaagtgttgtgattataggtatgagttattgtgtttggtttaaaataatttttgaggttatataagaatatagtttatgtttatttatagttgtatttaatttaattaagaatttgttttttaagatgaaaaa

SEQ ID NO: 15431 - DNA, 201 bp, Artificial Sequence
  Description of Artificial Sequence: Synthetic polynucleotide
tgggtttttgatttgtgtggatgagtagttttgagttttatatagggtgggtgatgttgtagattgataaggtttatttttggttatattgagttaaagtggaaggggtgtaggtgtggagtgttatgtgtgatgttattgttggttagttggagtggaggtgtttgttatgtgtatggggagatgtgtttttggttagtt

SEQ ID NO: 15432 - DNA, 366 bp, Artificial Sequence
  Description of Artificial Sequence: Synthetic polynucleotide
ttgttttgtagtttgattttagattgttgtgttagtaattagtgagattttgtgggtgtaggattttttaagttaggtgtgggatatagttttgtggtgtgttattttttaagttggtttgaaaagtgtaatatttgggtgggagtgatttgattttttaggtgtgttggttatttttttttttgatttggaaagggaattttttgatttttggtgttttttaggtgaggtaatgttttgttttgttttggtttgtttatggtgtgtgtatttattggtttgtgtttattgtttggtattttttagtgaggtgaatttggtattttagatggaaatgtagaaattatttgttttttgtgttgttta

SEQ ID NO: 15433 - DNA, 201 bp, Artificial Sequence
  Description of Artificial Sequence: Synthetic polynucleotide
ggtttttgtagggttgagtttttttaatgagtgttgttttttgttttatggtgtttggttttattgattgtttaagggttgaggattgtgggagtattgtgtgggattggtaggtagttttatttgtggtttttggtgtgggatttattgggtgaagttagttgggtttgtgagtttagtgtggatttggagaatttttat

SEQ ID NO: 15434 - DNA, 201 bp, Artificial Sequence
  Description of Artificial Sequence: Synthetic polynucleotide
tgtagaagatgagtgatttttgtatttttatatgaggtattgggtttattttattagggagtgttagatagtgggtgtaggatagtgggtgtagtgtattgtatgtgagttgaagtagggtgaggtattgttttattttggaagtataaggggttagggagtttttttttttagttaaagaaaggggtgatagatggtatt

SEQ ID NO: 15435 - DNA, 201 bp, Artificial Sequence
  Description of Artificial Sequence: Synthetic polynucleotide
tttttttttttagttaaagaaaggggtgatagatagtatttggaaaattgggttattttaattggaatattgtatttttttaataggtttaaaaaatggtgtatttggagattgtattttgtatttggtttggagggttttatgtttatggagttttgttgattgttagtatagtagtttgagattaaattgtaaggtggt

SEQ ID NO: 15436 - DNA, 384 bp, Artificial Sequence
  Description of Artificial Sequence: Synthetic polynucleotide
tttgtttttttggtttttgttgtttatgagaaatgaggaaaaataaaggttagatttttaataatttttttggaagaaagagttgttttgagtgggtgttggtgtttatatatgttgtttttaaaaaaatttgttttgtttaggtttgtgtgaatataatgttggatgaattttgtttttttagaagaaagttgggttggtgtgtttgatgatgtagtgtttgtagtggtgtttgataaagtgtagggtttttatggagattttgtagttttggatatttagtgtttggaggttaaagtagttggtggttatgatttgtaagttttggttggtgatgtttttgtaggatttgaggttgagttgtttgaggttgaagtagtttag

SEQ ID NO: 15437 - DNA, 216 bp, Artificial Sequence
  Description of Artificial Sequence: Synthetic polynucleotide
tgggagtgatttgattttttagttgtgtttattatttttttttttgatttggaaagggaattttttgattttttgtgttttttaggtgaggtaatgttttgttttgttttggtttgtgtatggtgtgtgtatttattggtttgtgtttattgtttggtattttttagtgagattaatttggtattttagatggaaatgtagaaattatttgttttt

SEQ ID NO: 15438 - DNA, 334 bp, Artificial Sequence
  Description of Artificial Sequence: Synthetic polynucleotide
ttgtgttggtaattagtgagattttgttgggtaggattttttgagttagatgtgggatataattttgtggtgtgttgttttttaggttggtttgaaaagtgtaatatttgggtgggagtgatttgattttttaggtgtgtttgttatttttttttttgattaggaaagggaattttttgatttttggtgttttttgagtgaggtattgttttattttgttttggtttgtgtatggtgtgtgtatttattgatttgtgtttattgtttggtattttttagtgagatgaatttggtattttagatggaaatgtagaaattattgttttttatgtta

SEQ ID NO: 15439 - DNA, 201 bp, Artificial Sequence
  Description of Artificial Sequence: Synthetic polynucleotide
tttgatgtaaggtggggtaggtaaaagtttggtagttatttgagaaggtgtgattaaaatggaggaatttgagagattttttgaggattgtaggtttggtgtggagtttgtgtttaatggtttggtttatggtagtgtggaggttattttggttttaatgtttggtgtttttgggttgtattagtaagattttaggatttt

SEQ ID NO: 15440 - DNA, 270 bp, Artificial Sequence
  Description of Artificial Sequence: Synthetic polynucleotide
ttttggtttttgtttgtgtttttttttttatatttttttgtaagttgagggagttggttttggttttggttagtttaggaatgggtttttatagtgtagtggtgggttgaagggttttttaagtgtggttagagtgggtgttaaggttgaggaggtgttaagagtgagtgagggttgtgagggttgttatgttggtatattgttattttttagaaggatgtagggtagagttttaggttggttttgttatttatgttggagtgtagtggt

SEQ ID NO: 15441 - DNA, 253 bp, Artificial Sequence
  Description of Artificial Sequence: Synthetic polynucleotide
ggttggaaaagtgtagtattttggtgggagtgatttgattttttaggtgtgtttgttatttttttttttgatttggaaatggaattttttgattttttgtgttttttaagtgaggtaatgttttgttttgttttggtttgtgtatggtgtgtgtatttattgatttgtgtttattgtttggtattttttagtgagatgaatttggtattttagatggaaatgtagaaattatttgttttttatgttgtttatg

SEQ ID NO: 15442 - DNA, 204 bp, Artificial Sequence
  Description of Artificial Sequence: Synthetic polynucleotide
taaattagtaaatttaatattttaggatttttgttaagaagtttggttttggttgggaggatggagtttagtgggtagtggagttgttttagtttttgttgttgttttgtttgggagggaggtggggggggttagtttttttgtttggttagttgttttgtttgggaggtgaggggtgtttttgtttggttgtttttattggga

SEQ ID NO: 15443 - DNA, 228 bp, Artificial Sequence
  Description of Artificial Sequence: Synthetic polynucleotide
atttgggaagtataaggggttagggagtttttttttttggttaaggaaaggggtgatagatagtatgtggaaaattaggttttttttatttgaatattgtgttttttttatgggtttaaaaattggtgtattaggagattatattttgtatttggtttggagggttttatgtttatggagttttgttgattgttagtatagtagtttgagattaaattgtaaggtagt

SEQ ID NO: 15444 - DNA, 217 bp, Artificial Sequence
  Description of Artificial Sequence: Synthetic polynucleotide
tttagtggttgtaggggttgttgtgtgttttgtagatggatatgtgttatttaatatagagatgtgttgagtttgggtgattagtgaattgtatgttattgtagatattagaaagtgaaagtatatgggggaaggttttgggtatagatttagtatggttattatttgagttggagttgtttgtgagatgatgagtgtttgtaatttgtattttgtg

SEQ ID NO: 15445 - DNA, 201 bp, Artificial Sequence
  Description of Artificial Sequence: Synthetic polynucleotide
tttggtgtttaatttttgaattttaaggaaaaatagggtagaatagaaagtgaaataggtttgaaggtatttattgtgtggtaatattttagatgagtttgatggtatttattgtgtggtaatattttagatgaatatttaagatgtgtttggagttggttttttttagtgggtttgtggttttagtgattttaagaatga

SEQ ID NO: 15446 - DNA, 204 bp, Artificial Sequence
  Description of Artificial Sequence: Synthetic polynucleotide
atggtgtgtatatttattgatttgtgtttattgtttggtattttttagtgagatgaatttggtatttttgatggaaatgtagaaattatttattttttgtgttgtttatgttgggagttgtagattggagttgtttttatttggttattttggtttttttttggtattttttttattttttatttaggattagtttgttgtttt

SEQ ID NO: 15447 - DNA, 223 bp, Artificial Sequence
  Description of Artificial Sequence: Synthetic polynucleotide
tagaagtataagtaattgtttttttttgtattttagtggaatgttgtgggttttttgaagatttttttttgttttgtaggttttggtattttaagtatgtgagtttgtgtaggaggtgttttgttttttggagttttttattgttttttagatatagttttggttttttattttgggtggaggtttttttagatgggttttgattgtttttgtatgtttattg

SEQ ID NO: 15448 - DNA, 201 bp, Artificial Sequence
  Description of Artificial Sequence: Synthetic polynucleotide
tatttataaggttgaggtaggagaattgtttgaagttgggaggtggaggttgtaatgagttgagattatattattgtattttagtttgggtgataagagtgaaattttgtaataatattaataataataataaaataaaaataaaaataaaaaagaaaataagagatgtggtggttttgtttgtaattttagtattttggg

SEQ ID NO: 15449 - DNA, 203 bp, Artificial Sequence
  Description of Artificial Sequence: Synthetic polynucleotide
tttaatattaagttaggtttagggaagtgttttttttttttttttttttttttatttgagatgtagttttattttgttatttaggttggagtatagtggtgtgattttggtttattgtaagttttgttttttgggtttatgttattttgttgttttagttttttgagtagttgggattattgtttgattaatttatttgtatt

SEQ ID NO: 15450 - DNA, 201 bp, Artificial Sequence
  Description of Artificial Sequence: Synthetic polynucleotide
tataaaaagaattataaaatattgttgaaaaaaattagataatagttgggtgtggtgttttatgtttgtaattttagtagtttgggaggttgagttgggtggattatgaggttaggagatttagattattttggttaatatggtgaaattttggtgaaattttgtttttattaataatataaaaaaattagttgggtgtgg

SEQ ID NO: 15451 - DNA, 201 bp, Artificial Sequence
  Description of Artificial Sequence: Synthetic polynucleotide
attattgttaaaaattaaattgggttgggtgtggtggtttatgtttgtaattttagtattttggggggttgaggttggtggattatgaggttaggagattgagattattttggttaatatggtgaaattttatttttattaaaaatataaaaaattagttgggtgaggtggtaggtatttgtagttttagttatttgggag

SEQ ID NO: 15452 - DNA, 201 bp, Artificial Sequence
  Description of Artificial Sequence: Synthetic polynucleotide
tttgttttgattttgtttgtgggtgttgggatatttgggtgtagagggtttgtgtttagttagaagtgatttttgtttttttttgtgtaggtgttggtgtgtttgttgtgtgtgtgtggtttgtgtgttgttgttttggtttgtgtttttatatgtgtaggaaaggatatgttgtttgtttttatgttttttgtgattttt

SEQ ID NO: 15453 - DNA, 201 bp, Artificial Sequence
  Description of Artificial Sequence: Synthetic polynucleotide
gaggttgaggtaggagaattatgtgaatttggaaggtggagtttgtagtgagttgagattgtgttattgtattttagtttgggtgatagagtgagattttgttttaaaaaaaaaaaaaaaaaaaaaaaaagtgatttgggttgggtgtggtggtttatgtttgtaattttagtattttgggaggttgaggagggtagatta

SEQ ID NO: 15454 - DNA, 201 bp, Artificial Sequence
  Description of Artificial Sequence: Synthetic polynucleotide
tattagttaggtatggtagtatatgtttgtaattttagttatttgggaggttgaggtaggagaattgtttgaatttgggaggtggagattgtagtaagttgagtttgtgttattttattttagtttgggtaagagtgaaattttattgggaaaaaaaaatttatagtttaggttgggtgtggtggtttatgtttgtaattt

SEQ ID NO: 15455 - DNA, 201 bp, Artificial Sequence
  Description of Artificial Sequence: Synthetic polynucleotide
ggttagttttttgtttggttagttgttttatttgggaggtgaggggtgtttttgtttggttgtttttattgggaagtgaggagtttttttgtttggttatgattttgtttgggaggtgtgtttagtagtttattggggatgggttatgatgataatggtggttttgtggaatagaaaggtgggaagggtggggaaaaaatt

SEQ ID NO: 15456 - DNA, 201 bp, Artificial Sequence
  Description of Artificial Sequence: Synthetic polynucleotide
attggttaaagagtattgtgggtttttggaagtatttgtttttttattagttgtaaattggaatgataattagtttttaggttttggtttttgaatgtatgttgtgaatgatgtattgttttggttttatggtaggggttggggaggtttgttttattttgtattttgatttgggtttaaagttgagtttgaagggttttt

SEQ ID NO: 15457 - DNA, 201 bp, Artificial Sequence
  Description of Artificial Sequence: Synthetic polynucleotide
tttgttattatgtttggttaattttttgtatttttagtagagatggggttttattgttttagttgggatggttttgattttttgattttgtgatttgtttgttttggttttttaaagtgttgggattataggtgtgagttattgtatttggttttttttttttttttttttttttaagatagagttttattttgttgttta

SEQ ID NO: 15458 - DNA, 201 bp, Artificial Sequence
  Description of Artificial Sequence: Synthetic polynucleotide
attttggaaagtataggaggttatgttttagtgtggttttttttttttgggtttaagttaaggtttttattgtgtttgttggttttttgggtttttgtgtggtggattttggatttttttgttttgttttgttttagggtttttgtatttgttgttattgtggtttggaatgttttttttttgaaattttgtgatttttat

SEQ ID NO: 15459 - DNA, 201 bp, Artificial Sequence
  Description of Artificial Sequence: Synthetic polynucleotide
tgtgtttataagaatattagttattggatttagggtttatttaatttagtatgattttattttaatttgattatatttgaaaagatttttggttgggtgtggtggtttatgtttataattttattattttgggaggttgaggtaggtggattatttgaggttaggagtttgagattagtttggttaatatggggaaatttt

SEQ ID NO: 15460 - DNA, 211 bp, Artificial Sequence
  Description of Artificial Sequence: Synthetic polynucleotide
tttagtttttaggatgtgttttttatggttttttttgtggtgtggttatgtttggatttttttggtattttttatttgttttgtatgatttgttttgtgtgatttgttttgtaaggttggggggagtgttttttttttttgtgattttttatttttttttggtatttgtttattttgttgtttaggttttttgtttttttggttttagggc

SEQ ID NO: 15461 - DNA, 201 bp, Artificial Sequence
  Description of Artificial Sequence: Synthetic polynucleotide
gtgtgtgtatttattgatttgtgtttattgtttggtattttttagtgagatgaattgggtattttagatgtaaatgtagaaattatttgttttttttgttgtttatgttgggagttgtagattggagttgtttttatttggttattttggtttttttttttgaaaagagtattttttaattaagaagatggttttggttgt

SEQ ID NO: 15462 - DNA, 201 bp, Artificial Sequence
  Description of Artificial Sequence: Synthetic polynucleotide
atttagtggattttatattggggttgtaggtggagttgtttgttagttttgtgttgtgtgtttatattttttagtttttgggtggttgatgggattgggtgttgtggagtagggggtggtatttgtttgggaggtttgggtggtataggagtttatggagtgggtgggaggtttaggtatggtgggttgtaggttttgagt

SEQ ID NO: 15463 - DNA, 201 bp, Artificial Sequence
  Description of Artificial Sequence: Synthetic polynucleotide
gatatgtataggttatttaagagaatgattgatttttggttatttggtgtttgtttgttgtggtggtgttgtgttgggtttaggggttttagggatttttgttgtgttgttagttttggaattttagtggggatttgttgtgtggaaatttttggataatagttttttttatggagaatttatgtttttataatgttatta

SEQ ID NO: 15464 - DNA, 201 bp, Artificial Sequence
  Description of Artificial Sequence: Synthetic polynucleotide
ttatttttttatatttgtagagtgttttattttttgtaatgtttatttgtgaaattgttgtgttaggttaggagtattttaagagtgagaggtagatgttgtttgattttttattttgataggggatttttttatttggtagtgttaatatttggtttttatgtattttttatggaggattattaggttagtttatgggag

SEQ ID NO: 15465 - DNA, 201 bp, Artificial Sequence
  Description of Artificial Sequence: Synthetic polynucleotide
ttttggtagagttagtatttgattttttttgtttggagatttaggtgatggtgttgtgtgatttttgattttgtggatgaggaaggtagagagagagtgtgtagatatggaggttggtgttgaggttgagggagttatatttggttgtaagtttgagggagggaagttgggtgtggaaatagtttagtgggtttagaagtc

SEQ ID NO: 15466 - DNA, 201 bp, Artificial Sequence
  Description of Artificial Sequence: Synthetic polynucleotide
ttgttgttatgtttagttaattttttgtattgtttagtagagatggggttttattgtgttagttaggatggttttgattttttgattttgtgatttgtttgttttggttttttaaagtgttgggattataggtatgaattattgtatttggttaatttagtggttttgaggaggatttgttaggagttttgtaaaatgttt

SEQ ID NO: 15467 - DNA, 201 bp, Artificial Sequence
  Description of Artificial Sequence: Synthetic polynucleotide
attggatggatgtttgttgttgttttattggggttgtgtggggagttgagtgtgaggtttgtttggattttgagtttttggagtttgttagtttgtgtttgtgggggttgggttttgttagttgggattttttgtttggttgattattttataaaggtgtggttggggaaggggttaggtttttggaaggatggggagggg

SEQ ID NO: 15468 - DNA, 201 bp, Artificial Sequence
  Description of Artificial Sequence: Synthetic polynucleotide
ttataggtgtgagttatttggtttttttttttttttttttttttttttgagatgaagttttatttttgttttttaggttggagtgtaaaggtgtaattttggtttattataatttttattttttgggtttaggtaatttttttgttttaatttttggagtagttgggattataggtgtttgttattaggtttggttaattt

SEQ ID NO: 15469 - DNA, 201 bp, Artificial Sequence
  Description of Artificial Sequence: Synthetic polynucleotide
attatttggtttagtaggtagaggtgtaggaatatggggatggatagtagtatgtttatgttggttttggttattgagggtgtgtatgtgaaggttagttgtgttgtttatgtgaagtggtagtggttgggtattgggtgaatggtgtatattgttagttttagtgagatgaggaatatgtgtttgtaggttatggtgatg

SEQ ID NO: 15470 - DNA, 201 bp, Artificial Sequence
  Description of Artificial Sequence: Synthetic polynucleotide
gtagttttagttattttaaaggtagaggtgagaattgtttgaatttggaaggagtaggttttagtgagttgaggttatgttatttttttttagtttgggtgatagagaaagattttgtttagaaaaagtaaattatgggagttggtgttggtgagtgttgtttgggaggtagtggttggaggagtggatgggttttgtggg

SEQ ID NO: 15471 - DNA, 201 bp, Artificial Sequence
  Description of Artificial Sequence: Synthetic polynucleotide
gaggttgaggtaggagaatggtgtgaatttgggaggtggagtttgtagtgagttgagattttgttattgtattttagtttgggtgatagagtgagattttgttttaaaaaaaaaataaaaataaaaataaaataaaataaaaaatgagttgggtatgatggtataagtttgtggttttagttatttaggaggttgaggtgg

SEQ ID NO: 15472 - DNA, 201 bp, Artificial Sequence
  Description of Artificial Sequence: Synthetic polynucleotide
gtagtttaataattttgtgttgtaaatttaaatattttatatattattagatattaaaaataaagatttatgttgtttgtttttatggagtgaggattttgttgattttatatttggttatgaatttgtttgaggtttattagttgaatgtttttggttaagaaagtttgttgagtgggggtggtttttaaattattattt

SEQ ID NO: 15473 - DNA, 201 bp, Artificial Sequence
  Description of Artificial Sequence: Synthetic polynucleotide
gtgtattttggtttattataatttttattatatttgttttttttaggtttaagtgatttttttattttagtttttttagtagttgggattataggtgtatggtattatgattggttaatttttgtattttttgtagagatgggattttgttatgttatttaggttggttttgaatttttaagttaaagtaatttgtttgtt

SEQ ID NO: 15474 - DNA, 201 bp, Artificial Sequence
  Description of Artificial Sequence: Synthetic polynucleotide
ttttatttttattaaaaatataaaaaattagttaggtgtggtggtatgttttgtaattttagttatttgggaggttgaggtaggagaattgtttgaatgtgggttggggaggttgtggtgagttgagattgtattattgtattttagtttgggtgatagtgtaagattttattttaaaaaaaaaaaaaatttgttaattta

SEQ ID NO: 15475 - DNA, 201 bp, Artificial Sequence
  Description of Artificial Sequence: Synthetic polynucleotide
tatgtattatttatatgagtttttagtaggttttggttttaaataggtatatgtgtatttttttagttttttattgggatttttttgttaagttatgtttgatgtttttgtttatagttatgagttgtagtaagatgtttaggtttggtgttagtgtgtgtagtatgtgtgttagtattgtggaatttttgttgtttgagg

SEQ ID NO: 15476 - DNA, 201 bp, Artificial Sequence
  Description of Artificial Sequence: Synthetic polynucleotide
tggtattttggaaggttgatgtgggggtattatttgagattaggggtttgagattagttttgtgaatgtgatgaaattttgtttttattgaaaatttaatgattagttgggggtggtggtgtatgtttgtaattttagttatttaggaggttgaggtaggagaattgtttgaatttggaaggtggaagttgtaatgagttg

SEQ ID NO: 15477 - DNA, 201 bp, Artificial Sequence
  Description of Artificial Sequence: Synthetic polynucleotide
ttgaggtgggttgggtgtggtggtttatgtttgtaattttaatattttgggaggttgaggggggtggattatttgaggtgggtttggtgtggtggtttatgtttgtaattttaatattttgggaggttgagaggggtggattatttgaggtgggttgggtgtggtggtttatgtttgtaattttaatattttgggaggttg

SEQ ID NO: 15478 - DNA, 201 bp, Artificial Sequence
  Description of Artificial Sequence: Synthetic polynucleotide
ggggttttggttaggggtgggtgaggttggtgtttttttaggttttttttagttataggtagtaggtgttatgggagttttgttggtattttttttttttgttagggttttggtttatttgatggtgtagtttttttttaaggtgtgtattggtgtagatattgtgtaggaagttaggttgatgtagatggtttttaagtc

SEQ ID NO: 15479 - DNA, 201 bp, Artificial Sequence
  Description of Artificial Sequence: Synthetic polynucleotide
aaagttgtttaaagttttataatgagttgatttattgggaataggaggaggttttgttgttagtttttgtgttatatttggtattttgtttaggtttattggagaggagattatatgttttttttttagtttttttaatttttttagttaagataggtgttattatttattttagttttagtgtgttttgagtgtgttgga

SEQ ID NO: 15480 - DNA, 201 bp, Artificial Sequence
  Description of Artificial Sequence: Synthetic polynucleotide
tatttttttgttttagttttttgagtagttgggattataggtgtttgttattgtgtttggttaattttttgtatttttttagtagagatggggttttattgtggttttgattttttgattttgtgatttgtttattttggttttttaaagtgttgggattataggtgtgagttattgtgtttggttgtgtgtgttttttaa

SEQ ID NO: 15481 - DNA, 201 bp, Artificial Sequence
  Description of Artificial Sequence: Synthetic polynucleotide
gtatgtggtagtaggatttatttttggggtgttttgggttggtgaatttatatttttttatgttaatggtttgtagtatttgtagtttgtgggttgagttggttgtggggggtttattggtggtaggggtattattggggagagtggtggatggttgggttggtggtggtggaggtagtaggggttttgttatgtggttgt

SEQ ID NO: 15482 - DNA, 279 bp, Artificial Sequence
  Description of Artificial Sequence: Synthetic polynucleotide
ggtggaagagttgatagtaaggggagtggttaaatggaggtggggtttggaagggggtgtggtttgtgggtttttgggttgtttggtttttttaggtgttgtagtggaaggtttggagtagaggttgtttttttgtttaagtattttttgggtgagtttatatttttggtgtgagtatgatttttttttttagggaaggttgggttttttgttggggtttgatttgattttttttttttatttttttttttttgttttatatttagtgagtttaggttt

SEQ ID NO: 15483 - DNA, 201 bp, Artificial Sequence
  Description of Artificial Sequence: Synthetic polynucleotide
ttatatgggaggttgaggttagagaatggtgtgaatttgggaggtagagtttgtagtgagttgagatggtattattgtattttagtttgggtgatagagtgagatttagttttaaaaaaaaaaaaaaaaaaaaaggaaaatttaggtttttttttagattgaaatttttgtaaatataatttatgattttatagtagttag

SEQ ID NO: 15484 - DNA, 201 bp, Artificial Sequence
  Description of Artificial Sequence: Synthetic polynucleotide
ttttgttgtaaaagaagtgtttatagaatttttatttttttttattattattattttttgagatagagttgttgttgtttgggttggagtatagtggtatgattttggttaattgtaagttttgttttttgggtttatgttatttttttgttttagttttatttttttgttttgttttgttttgttttgttttgtttttga

SEQ ID NO: 15485 - DNA, 201 bp, Artificial Sequence
  Description of Artificial Sequence: Synthetic polynucleotide
gtttttttaatattttgaaatttaaagtgtgatagttttagaggattattaatataagtattatttgaaaatttgttagaaatgaagaattaggttgggtgtggtggtttatgtttataattttagtattttgggaggtttagatgggaggattatgatattaggagattgagattattttggttaatatggtgagatttc

SEQ ID NO: 15486 - DNA, 201 bp, Artificial Sequence
  Description of Artificial Sequence: Synthetic polynucleotide
tatggtgaaaatttgttttttttaaaaatataaaaattagttaggtgtagtggtatgtgtttgtagatttagttatttgggtggttgaggtaggagaattgttggaatttgggaggttgaggttgtagtgagttgagattgtattattgtattgtagtttgggtgatagaataagattttaatttaaaaataataataata

SEQ ID NO: 15487 - DNA, 201 bp, Artificial Sequence
  Description of Artificial Sequence: Synthetic polynucleotide
tttgtttaggaaatgtatataggagttggttattttgtgttttgagtttttttggaggtgttggatttttagagagagaaatagagatatgtaagagggtgaagatgttttagtggtgatatattggggagttttgtttatgatttgtttatgattggtatatttaatttgttttatggaattttattttatagtttggtt

SEQ ID NO: 15488 - DNA, 201 bp, Artificial Sequence
  Description of Artificial Sequence: Synthetic polynucleotide
tgttaggataagtgagggtggtttgagttttgtgtttatatggtgtatgttgtttagtagatgatattgatggttgtaaatgttgtagggaatatagtgtgggtgtaaatgttaatggtgtttgtgttgatgggtttgagttgggtatggatgtttttttggttttttgagtgggttgttttttttttttttgtttttttt

SEQ ID NO: 15489 - DNA, 201 bp, Artificial Sequence
  Description of Artificial Sequence: Synthetic polynucleotide
tttttgttgagagtggattttgtgtgtgtgttttttaggaatggtgataagtatgatggtgattgggtttgggattggtgttagggatatggggtgttgtgttgtgttgatggttttatttataaggtatttgggggtgtgtggtatttgttgtttagagggtataggttttgtggtgggtagggtgtgtggggtgtatgg

SEQ ID NO: 15490 - DNA, 201 bp, Artificial Sequence
  Description of Artificial Sequence: Synthetic polynucleotide
gatattatattttatatttttttattttttttgatttggagttttgttttgttgtttaggtttgggtgtagtagtgtgattttggtttattgtaagttttgttttttgggtttatattatttttttgttttagttttttgagtagttgggattataggtgtttgttattatgtttggttaattttttgtatttgtagtaga

SEQ ID NO: 15491 - DNA, 201 bp, Artificial Sequence
  Description of Artificial Sequence: Synthetic polynucleotide
tttttttttagaaagtatatgaataggttgggtatggtggtttatgtttgtaattttagtattttgggaggttgaggtgggtggattatgttagaagattgagattattttggttaatatggtgaaattttgtttttattaaaaatataaaaaaaaataagttgggtgtggtagtgggtgtttgtggttttagttattttg

SEQ ID NO: 15492 - DNA, 201 bp, Artificial Sequence
  Description of Artificial Sequence: Synthetic polynucleotide
gtgtgagagttatatgttaggaataagaggtatgttgagaggtggttgggtatggtggtttatgtttgtaattttagtattttaggaggatgaggtgggtggattataaggttaggagattgagattattttggttaatatggtgaaattttgtttttattaaaaatataaaaaattagttgggtgtggtggtgggtgttt

SEQ ID NO: 15493 - DNA, 203 bp, Artificial Sequence
  Description of Artificial Sequence: Synthetic polynucleotide
ttttataatgttttttattatttgtgagtatggtttgtaatgtggaagatataattttatttgattttttttagatttttttgttgttttagttttttatgtgttagtttttgggtttttattttaaatttttttaggtttagaatgttttgttttaaattttattgatattatttgtgaaattgtagttttttatgattaat

SEQ ID NO: 15494 - DNA, 201 bp, Artificial Sequence
  Description of Artificial Sequence: Synthetic polynucleotide
attatatatggttgggtgtgatggtttatgttattgagtgattgttgtaattttagtattttgggaggttgagatgggaggattatgaggttaggagattgagattattttggttaatatggtgaaattttgtttttattaaaaaaataaaaatattagttgggtgtggtggtgggtgtttgtagttttagttatttggga

SEQ ID NO: 15495 - DNA, 201 bp, Artificial Sequence
  Description of Artificial Sequence: Synthetic polynucleotide
agttttagttatttgggaggttgaggtaggagaatggtgtgaatttgggaggtggagtttgtagtgagttgagattgtgttattgtattttagtttgggtgatagagtgagattttgttttaaaaaataaaaataaataataataataattttagatattttataataatttttaggtataagagtttttatgagagtagg

SEQ ID NO: 15496 - DNA, 201 bp, Artificial Sequence
  Description of Artificial Sequence: Synthetic polynucleotide
tgggggttttagaatttttgtagtttatatttttttggtttttttttgggtagtttggaggtttttgattttttggagtttttggtatttgagtttttttgtgaaagtttgtttgagaagggtttttgttttgggtttggtagattggagtttttttttgggttttttttttttttttttgggtgttttgttttttgttaa

SEQ ID NO: 15497 - DNA, 201 bp, Artificial Sequence
  Description of Artificial Sequence: Synthetic polynucleotide
atgtgttattatgtttggttaatttttgtatttttagtggagatggggttttattatgttggttaggttggttttaaattttttattttgtgatttgtttgttttggttttttaaagtgttgggattataggagtgagttattatgtttggttttaattttagttttatagatgaaaaaatggaagtttaggattagtgat

SEQ ID NO: 15498 - DNA, 201 bp, Artificial Sequence
  Description of Artificial Sequence: Synthetic polynucleotide
aagtagtatttggttttttgtttttgtgttaatttattttggataatggtttttagttgtatttatgttgttgtaaaggattggattttgttttttttatgattgtatagtattttatggtatatatatatatatattatatttttttaatttggtttatttatgtttttgttgttgtgaatagttttgtaatgaatatgt

SEQ ID NO: 15499 - DNA, 201 bp, Artificial Sequence
  Description of Artificial Sequence: Synthetic polynucleotide
ttaaataaatgttgggtgttagggttgttgagtaagataataggttgtaaggatgtagtagaggatttttggttgatttgttgtgatggagtgagttagtggtgaggtttgaaggtttttgttttattttttttttggagtagaggttggggagggtgttgggtgttagtatagagtagagggttggttatggaattgggg

SEQ ID NO: 15500 - DNA, 201 bp, Artificial Sequence
  Description of Artificial Sequence: Synthetic polynucleotide
gggagtgtagtggtgtgattttggtttattgtaatttttgttttttgggtttaagtgatttttttgttttagtttttttagtaggtaggattatagttgtgtgttattatatttggttaattttttgtatttttagtagagattgggttttattatgttagttagaatggttttaatttattgattttgtgatttgtttgt

SEQ ID NO: 15501 - DNA, 201 bp, Artificial Sequence
  Description of Artificial Sequence: Synthetic polynucleotide
ttagtagaaatagggttttattatgttggttagaatggttttgattttttgattttgtgatttgtttgttttgtttttttaaagtgttgggattataggtgtgagttattgtgttttgtttattgtttatttttttttgtttgttttattttgattgttggggttttggatattatataaagagttagttggagagtgaga

SEQ ID NO: 15502 - DNA, 201 bp, Artificial Sequence
  Description of Artificial Sequence: Synthetic polynucleotide
ggaatgtagtggtgttattttgttgattgtattttttgttttttggttgtaagtgatttttttgttttagtttttttagtagttgggattataggtgtgtgttataatatttagttaatttttgtatttttagtagagatgggtttttattaagttggttaggttggttttgaatttttgattttgtgatttgtttgtttt

SEQ ID NO: 15503 - DNA, 201 bp, Artificial Sequence
  Description of Artificial Sequence: Synthetic polynucleotide
tattttggttttttaaagtgttggtgttataggtgtgaattattgtatttggtttgttttttattttattatttatttattttttttgagattgagttttgtttttgttgtttaggttggagtgtgtagtggtttaattttggtttattgtaaattttgttttttgggtttaagtgatttttttgttttagttttttgagt

SEQ ID NO: 15504 - DNA, 3238 bp, Artificial Sequence
  Description of Artificial Sequence: Synthetic polynucleotide
tttttttttggattggtttaatttttttttttaagtttggtattttgtttttttttagtgggggatattttgttgttttggggtgtttgttgtgggtgttgtatgattttgggtgtaagttagagattttataaatatgttgggttttgtgtagtggtttttgggaaggtattgttatttgtgggagggtttggtttgttattttttattttttgttgttttaatgttattttttaagtttggtgtttttttttttttttttggaggtttttgtgttgttttggggtgttttttgtgggtgagatatataatttgggtgtaagttagggattttgtgattatttttggtttggtgtaggggtggttatttttgggatgatattattttgttatttttttttttggattgtttttattattttttttaattttggtgttttgtattttttttttagtggtttttttgttgttttgtggtgttttttgtgggtgagatatgtatttggggtgtaagatagggattttaggatgtttttgggtttattgtagaggttgttgggaaggtagtgttgtttgtgagaggattttagtatttttgttttttttttttggggttgttttaatttttttttttaagattgatgtgttgttttttttttttgggaatttttttgttgttttgtggtgtttgttgtgggtaagatatttattttgggtgtaagttagggaattaataatttttgtatgtttggtaaaggggttgttggtaaggtattgttatttgtgggattattttagttttgttgtttttttttttaggttatttaaatgtttttatttaagtttggtgttttgttgtttttttgtgggggattttttgttattttggggtgttttttgtgggtgagatatgtatattgtgtgtaagatagggattttgtgatttttttgggattggtataggggttgtagggaaggtattgttatttgtgaaaggattttagttttgttttttttttttttgggttgttttaatgtttttttttaagtttggtattttgtttttttttttttggggtttttttgttgttttggggtgttatttgtgggtgaggtatgtattttgggtgtaaattagggattttaagatttttagggttaggtgtaggggatgttgggaagttattgttttttgtggaaagtttttttttggattgttttaaagtttttttttaagtttggtattttgttttttttttttggagttttttttgtagtttttgtgtgtatatttaggtgagatatgtattttgttgtaagatagggattttaaatttttttgtttgggttaggtttaggggttgttgggaaggtattgtggtttgtgggatgattatagtttagttgttgtttttttttggttggtttaatgtttttttttaagtttgatatgttgttttttttttttgggggttttgttgttatttttatgtgtattttgtgagtaagataggtattttgggtttaagttaggggttttattgtttatttgggttttatttagaggttgttgggaaggtattgtttttagtggaaattttttttttggattgttttaatgtttttttttaagtttggtgttttgtttttttttatttggggattttttattgtattgtggtgtttattgtgggtatgatatgtattttgggtgtaagttagggattttataattattttaggtttgatgtaggggttattggataagatattgttgtttttgggatgatattggtttgttttaattttattttttaattttggagttttgtattttttttttgggggtttttttgttgttttgtggtgttatttgtgggtgagatatataatttgggagtaagttagagattttatgatatttttgggtttattgtagaggttgttaggaaggtggtgttatttgtgggaggattttagttttattatttttattttggggttgttttaattttttttttaagtttgatgtgttttttttttttttgggaatttatttgttgttttggggtgtttttttgagtgagatatgtattttgggtgtaagttatggattttaggattattttggtttagtgaaggggttgttaggaaggtattgttgtttgtgggagaaatttagtgttgttgtttttttttatgggttattttaaagtttttttttaagtttgaggtgttgttttttttttttaggggtttatttgttgttttggggtgttttttatgggtgaaatatgtattttgggtgtaagatagggattttatgatttttttgggtttagtgtagggattgttaggaaggtattgttatttgtaggaggaatttgattagttgtttttttttttgtgttgttttagtatttttattaaagtttggttttttgtggtgtttgtttggtggtttttttgttattttggggtgtttttatgggtgtgatttgtatttttggtgtaagttagggattttatgattattttgggtttgatgtaggggttgttgggaaggtattgttgtttatgggatgattttagtttgttatgtttttttttggattgttttaattattttttttaattttggtgttttatattttttttttggtggtttttttgttgttttgtggtgttttttgagggtgagatatgtattttgggtgtaagttaaggattttatgatgtttttaggtttattatagatgttgttgggaagatagtgttatttgtggtaggattttagtattttttttttatttttggggttgttttaatgtttttttttaagtttgatgtgttgttttttttttttgggaatttatttgttgttttggggtgttttttgtggaattttgggtgtaagtttgggatataataatttttttgggtttggtaaaggggttgttgggaaggtattgtggtttgtgggaagtttttttttggattgttttaaagtttttttttaagtttggtgttttgttttttttttagggggtatttttgttgttttggggtgtttttttgtgggtgtgatatgtattttgggtttaagttaggaattttatgataattttgagtttggtgtaggggttgttgggaaggtattgttgtttgtgtgatgattgttgtttgttgtttttttttttgtgttgttttaatgttattttttatgtttggtgtttta

SEQ ID NO: 15505 - DNA, 201 bp, Artificial Sequence
  Description of Artificial Sequence: Synthetic polynucleotide
tgttattttgtttggttaattttgtgtgtgtgtgtttttagtagagatggggttttattgtgttagttaggatggttttgattttttgattttgtgatttgttttttttggttttttaaagtgttgggattataggtgtgagttattgtgtttggttttttgtatattattttttgagatattttgaggtaatagttttgg

SEQ ID NO: 15506 - DNA, 201 bp, Artificial Sequence
  Description of Artificial Sequence: Synthetic polynucleotide
tgatgtttaagtatttgagaatggtgattaattattttggagagtatttgtaaaggtggttttttagttgttttttttggaagttgtagtttttgtgtttgtttttgtattttgtatatttgttgaggtggggtgtgttaattattaaattattaatgagtgatggtttaaattgtaggtagagtaatgaatagatggtgg

SEQ ID NO: 15507 - DNA, 201 bp, Artificial Sequence
  Description of Artificial Sequence: Synthetic polynucleotide
tgtaataagtttgggggttgattttgggtgtgttgggggtgagggggttatggtggagatggatatgggtgtggggtggttgagatttgtatggtttagtgggtattggtattgtggggtttttgtttttagaggattattgttttatattgaagtttttttttttgtatatttagagtttgatgtatttttaattattgt

SEQ ID NO: 15508 - DNA, 201 bp, Artificial Sequence
  Description of Artificial Sequence: Synthetic polynucleotide
gggtgtggtggtgggtatttgtaattttagttatttgggaggttgaggtaggagaatggtgtgaatttgggaggtggagtttgtagtgagttgagattgtgttattgtattttagtttgggtgatagagtgagattttgttttaaaaaaaaaaaaaaaaaaaaagaagaagttagagtaaggaggtagaatgatttttagg

SEQ ID NO: 15509 - DNA, 201 bp, Artificial Sequence
  Description of Artificial Sequence: Synthetic polynucleotide
ggttagggtgtatgtggtgttggggtttggggggatgtttgttgttttggttgtattttggttatgtatatttttgggggtggttgttttattgtagggtgtgggggtggagtttggtttaagaagagtggtaaagggtgggtggttttggtggtttagtttagggtttgggagtgtttgggggtttttttgttttggggg

SEQ ID NO: 15510 - DNA, 201 bp, Artificial Sequence
  Description of Artificial Sequence: Synthetic polynucleotide
aaaaagtaaaaaataaaaattagttggttatagtggtgggtgtttgtaattttaattgtttgggaggttgagttaggataatagtttgattttgtggggtggaggttgttatgagttaaaattgtgttattttattttaggttgggtgtaagagtgagattttgttttaaaaaaaaaaaaaaagttttatgttgggtgttg

SEQ ID NO: 15511 - DNA, 201 bp, Artificial Sequence
  Description of Artificial Sequence: Synthetic polynucleotide
taggtgtgagttattgtgtttggttatttttgataattttattttaaatagtgataggttaaaagttaagagtggatgttttagtatttagttttttagtgttttgttagttattttaagtttgttgataggagtttgattttattgattttttttttttttagagttatgtttattttttaaaattttaagaagttgttt

SEQ ID NO: 15512 - DNA, 201 bp, Artificial Sequence
  Description of Artificial Sequence: Synthetic polynucleotide
attttggaggttgaggtaggagaatggtgtgaatgtgggaggtggagtttgtagtgagttgagattgtgttttttgattttaggtgatttgtttgtttttgtatttggttaatttgtttttgtatatataatttttttattgtttaatatattttagggttttttaattttatattttatattttagtttttttaatagat

SEQ ID NO: 15513 - DNA, 201 bp, Artificial Sequence
  Description of Artificial Sequence: Synthetic polynucleotide
tagggttttgttgtgttggttgggttggtttttagtttttaattgtgagtgatttgttaattttggttttttgaggtgttgggattgtagatggagttttgtttatttagtgtttaatggtgtttaggttggagtgtagtggtgtgattttggtttattataatttatattttttagttgtttgttttggttttttaaaat

SEQ ID NO: 15514 - DNA, 201 bp, Artificial Sequence
  Description of Artificial Sequence: Synthetic polynucleotide
aggttgaggtaggtggattataaggttagaatattgagattattttgggtagtatgatgaaattttgtttttattaaaaaatataaaaaattagttgggtgtggtggttggtgtttgtagtattagttgtttaggaggttgaggtaggagaatggtatgaatttgggaggtggagtttgtagtgagttgagattgtgttat

SEQ ID NO: 15515 - DNA, 414 bp, Homo sapiens
ccgccagtgtccgtcgccttccacacgtggccgcagttctgtgcatggggccgcccgccatcctgccgcctctgacctgggctgtgggctcgtgacacgtgtctgagctttccagtcgtggccgtgacgctctgtgcggaggctccgtccgcgtgctgcctccgtcccctctgccctggacggccactcactacctttgtctctcaccctgggggtttcatgaccccggagcctccacgtcctggtacagagcctgcctctccgggactgggcttcggccgagcagacaccgcctagctgctctttgaccagcgttctctgctctgcgtctggctggcatcggcggcttgctgagtccagcctggcatctcgctggcatcggcggctcgctgggtccagcctggcgctgacacg

SEQ ID NO: 15516 - DNA, 987 bp, Homo sapiens
ccggagggtccccccgccgacaggccccacgtctcccacctgcaggacaatgaagtggccgccttgcagccccccgtggtgcagctgcacgacagcaacccctacccgcggcgggagcacccccaccccaccgcgcggccctggcgggcagatgacatcctggccagcccccctcgcctgcccgagccccagccctaccccggagccccgcaccacagctcctacgtgcacctgcggccggcgcgacccacaagcccacccgcccacagccaccgcgacttccagccggtggtgagtgcccccccaaagtgggcttggctccatctagcccctcggctctcggcagcagaagagggcccagcccctgcagagctgctgggggtcccaggcttcggccatgggtgggggtctggcggctcagggccactcagggcggcttggctggccctgggacttgccctctggtggccaagcagtggtcatgaaagtccagccgctgtcacatccttgaggaaccggcgtacctccgcctacagcggcagctgggggcacccacgtggcccggggctgctctgacctggcagcgtatgggggctgctgcctgggcccctcagtgtgtcacttgcgcgcctcccgctcagcgcccctcggccgtgcctgtccacacaggtgcggggccggggtggtgcgcccggggcctgggtgcagggggcagcgtgggacacagcccgtgacgcgcccctctccccgcagctccacctggttgcgctcaacagccccctgtcaggcggcatgcggggcatccgcggggccgacttccagtgcttccagcaggcgcgggccgtggggctggcgggcaccttccgcgccttcctgtcctcgcgcctgcaggacctgtacagcatcgtgcgccgtgccgaccgcgcagccgtgcccatcgtcaacctcaaggtgggtcagtccagtcctgagggcgcgggctcctcg

SEQ ID NO: 15517 - DNA, 1061 bp, Homo sapiens
tcgctgttggtggggcccggggagccctgctgtggccgccactcaccaggtaggcggtgaaggcctcggcgtcggcatccaccagcgtggttagcttggccgaagcctcgcggaagggcgggatcaggcgccgcatcgtcgtgtccagggactggaattggcgccgcccgtaggtcatgaggcccaccatggagcccagcgccgcaccctgcgagaggggtggatgtgggggtcgcagggaccccagacggcccgggaccgaccccaggaagagccaggggcccgggtgatccctgcgggggtcccacccgtgtggcccccacgtctccacccagggcggccccaccgcgccctccccaccccgtgccctccccccaacagcgcccttccccctccccgccctccccccaacaactgcgcctcccctgcccctccccccgcgctcaccatggccgcagcggccgccgccaccgagccgcccccgggggccgcagagcgggcacccacctcccccacgaaggcgcgcagggacttgctgcccaggcctcgctcaggcccgcgctcagggaccaggtacctgcagggtgggcgcggctcagcgggtctggccggggttggtggggggagcgcagtcctcccggggcggccccaggccccacgcccgtctgcacccacggggaggtgaccactcggctgagaacctgcggggacccggccggggtctctgtgcccccctcagcccccagaccccggcttggcgcaggccgagtaggcgcccaaagggaggcgctgggaggactcagccgggtctccacgcagggaccccagcgccccgcaaggcccgagaggcagagcccgggaggggtgagaagagggcgggagggcagaggctcactcgatgatccgctccttagggctgaaggggcacagggagtccaggcccagccggctcaccacctggaaaaggggcttggagtggaaacggcctcggcgcgtctccaccaccaggaaagcctcggaacccgcgggtcccacccttgcggcagccgccccctgccccg

SEQ ID NO: 15518 - DNA, 382 bp, Homo sapiens
gcgtgtttatcatccggcacacgggagacccacgcgtgtttactgtcgggcacaggggagacccacgcgtgtttactgttcggcacacgagagacccacgcgtgtttaccgtttggcacagggagacccacgcgtgtttactgtccggcacaggggagacccacgcgtgtttactgtccggcacagggagacccacgcgtgtttactgtccggcacaggggagacccacgtgtgtttactgtccggcacagggaagacccacgtgtgtttactgtccggcacacaggagacccacacggggcctgtttaccatccggcacacaggaggcccatgcatctttaccgtcaggcacacgggaaacccacgcgtgtttaccgtccg

SEQ ID NO: 15519 - DNA, 261 bp, Homo sapiens
acggaggacttttcgcccctgcggtcagctggaccaggtggccggcagcgagacggaacaagtagaccaggctgagggtgaaggcgcaggcgatcagcagcatggacaagaggttgccgcctgccacctcctccatcgcctggcccagcacctacccacccgcctgtagcaagcccagcagcatcatcccggccgccgccgccatttcactctgtcggagacactgaaggccgaggtcgccaccgatcctcctaatcgacg

SEQ ID NO: 15520 - DNA, 892 bp, Homo sapiens
acgcgggccttcctcccgaagcccgtttaggaggcagatggagcgactcgactcggaggacaggagggtgttcaggggccctggcgccacagttcccacaggatgaccttggagcgttcctggatttcgagctgccctggctaaggagccgcaccccagtcctcgcccgcagctcacgggaaatgaagttgtctggcctgaagacctgcccgaagggccccgagcgcacagagtccatggtgcccggctccagatccacgagcacagcgcgggacacgtacctgccacctgcgtggggcgggagggcatgagcgaggggagggccgcgttcccaggagggcggtgggggaaggacgggggtcgcaccgctggcctcgtggtggtgcacgttgatgcgctccagctgcaggtggctgtccccgtggtaggtgccagcggagtcgatggcatgttcatcagagatcacctcccagaactgcggagacgggaggggccagacaggccggggctgagtcacggaggcgccccagccgctctcccacccccatccgcacccccatccccaggccgccctgtccctggggtccacccccgccgcctcgccagccacccggttccaccgtccccggcagggagcccaggggccgcaatgcaggggcaccgcccccgccgctgccaacatcttccccggccacccggcaggcccgggctgggccctcagagccccggctgccaaccttggcgccgatctggttcccgcactgcccggtctgcgtgagcacaagctccctcgtggccaaggcaggattagggcggcaggagaagcgcgagaaggaggagcagacgcacagcgacccagcccggcctccgccaacgcttaaacagccccgcg

SEQ ID NO: 15521 - DNA, 682 bp, Homo sapiens
ccgggggcccacggtgtagcgggtcgtcagccgggccccgggccttctgggcagcaagggccctggcaggaccctgagggctgggccaaggagggcagttcgctccggggcacctgtcaggggccccacacggctgcttttaggccaggggtggcaaagacgctgctgccgcctgctctgggctcggctcccatggctgtgaaggaccctcgtcactccccgtcgcctgcctgggctgcccggggaccctcctgctgcgtcagcacagagcctggaaccgcggccaaggcaggaagctcccctgtgaaggcaccaagcacggcagacgccctcacatcgccggggcccgtttccctgtggacgggaagtgggaacgtgacgtggacgtgacgtgggaacgtaacgtgacgtgacgtgacgtgacgtggcatggcgcgaggacagcgcggcgggagcggcgcctcagatccagcagggagggagacgaaaggcggatggaagaggggcccccggaccccgcccctcgaggcttgtgtgccgccctggctgcggcgttctgggcgacgggaaacagagtcaggacacagaccagggagggccggggcagagccagggcacctgcgggcgaggacggctgggtgctgggtccccggcgtcagggcgcaatgccgcctgctgggcg

SEQ ID NO: 15522 - DNA, 223 bp, Homo sapiens
acgcgcctcggtaggacctttactccacgtgatccacttccgggtttgctgcgcaggacagaagccagtcccgggtggggcccccgaacatggtggcggggcctgggtgggacagaggcggggcgcgaggcggagagaccttgccctttagaacaggcaaagggcggggccgggaccagacctgtgcatctctccgcctcgcacccagcgcctctgtttttcg

SEQ ID NO: 15523 - DNA, 255 bp, Homo sapiens
gcggacagctcgaatgtactgcagaagcatccgcccatcagtgggttccatcgccgggcacaggcctgtgtgcccagggcagagcgcctggtgcatgctgtggagggcgtgggcaatggcgtacaccgcatcaatcacaaactgcaccttgccctcctgctcgtaggtggagtcccggccgatgcgttcctcgcctgtcctagggatgcccagagaaagtgtgcccggcccccatgcaccgaacccggcctcccg

SEQ ID NO: 15524 - DNA, 309 bp, Homo sapiens
ccgtccgtgcaccttggagacatagtagacgcactgctggaaggcgtacagcaccacctcctccagcaccgccatggcctcctcgctggccgtcagcgtgcaggagaacagcgattccttcgagcctgccgggagacagccacgccaatggtcacaacgggcacagcgctcaggaacgcagcaactcagccagccgccagctctttccctggcgcgggcaccacccaacgcgcccatctggggtccagatgcgataaactggccgagggactctgggccctggctgggacgagcgcagcaaacctgccg

SEQ ID NO: 15525 - DNA, 992 bp, Homo sapiens
ccgccctgcgctcagcagcacagcaccgtgggggtcagatagaggcgctcccgcctcccagccggggccagctccgggccccctcttcccccagaccggcacaggacccagaccgcccaccccagcacactgacccagacagtctcgcggatcagcctggctatcttgagcaggagctgcccgaatgtgcccggctggaagtgggtggccgagtgctggatgcagaggcacaggaggaaggcgggggtcagcttgtggtcgtcgccccccggctcgatcaacgtcatgatcctctgcagcagcgtgtcctccaggtggggctcaaactccaggagcagctgctggcgccggggcagggcggcctgagtaggggaggcggctccccgggccccgagcgcggccccgcacagccggcagctctgcggcacagcccggaggcgcgccaaggcccgggcgggcaggggctgggcctgcgcggggtccttgaatagcagcaggtagtagagccccagggagagcaggtccccgtggtgcagcaccacggtcctgtgccccacctcggagaagttgacggagatgtgcgccccggggatgggctccaggaccagcctccccgcggcctggccgctgtccgggagcggttgccggcggatggtgcagtgtagaggcaggatgtcgggggctgagaggctgatgctgggcttgctggagggggtccgctggcccaccgtgtgccggtcccggttgagcacatacaccaggctgtcctgaaacagagactccgctcagggcaggcgtaacgcgagcagcacacgggaaaagcgtcccgtgtctagtcactggttgctgaagcagcgtggctgggatgctgtcgccacgggctctccatgtccctggccacccccacaccagaaccccgacggctctcaggaacccgcccctcgatgtccgggcccatcccagaggaggtcggtttcccggaggagcacacg

SEQ ID NO: 15526 - DNA, 265 bp, Homo sapiens
ccgcgtcctgcgctcctggttttctcctcttctagtgtcttccccacctggcgtcgcccggccgcaaccctggccctcctggggaagaggttcggaccctactctttatttgacatgaagaggttcggactcccagttttattcggcatgttcacgggcagcagccccattttgtttggcgtgttcacgggcagcagccctgttttattcggcgtgttcacggtcagcagccccgttgtgcttggcgtgttcacgggcagccccg

SEQ ID NO: 15527 - DNA, 488 bp, Homo sapiens
ccggcggaggcgggcgtggtgggggaggggctctctcttttgcccttttacccctctggtaggcgccctagggcgggggtgctgccgcgcgcttcggcgcgccttggttctgtcaccagccccactggggcctcacaatcgctcagccgtccagtgcgcgcctggagaaagagaagtgggcgactacggagcagcgtctccattactgaccgttttctcgccattgtacccacacaacttgctctaaatgggcaatttattaagtatattttgtccctgttcccgccgcaggcccctgccggaccgtcgcccacaagctcccatagcccgtgagtcctctcagcctggcccggctcaccctgtggcgcccacgtctaccccgggccctttccgattcctctttaaccctcagcagagtcgcgggccttctccagtcagcttctacagcgcgcctaggagaccgtgtcctctcccgccagacacgggcg

SEQ ID NO: 15528 - DNA, 676 bp, Homo sapiens
ccgctacctggacatgacggactgcttcgtgctggaggacgaaggcctgcacaccatcgcggcgcactgcacgcagctcacccacctctacctgcgccgctgcgtccgcctgaccgacgaaggcctgcgctacctggtgatctactgcgcctccatcaaggagctgagcgtcagcgactgccgcttcgtcagcgacttcggcctgcgggagatcgccaagctggagtcccgcctgcggtacctgagcatcgcgcactgcggccgggtcaccgacgtgggcatccgctacgtggccaagtactgcagcaagctgcgctacctcaacgcgaggggctgcgagggcatcacggaccacggtgtggagtacctcgccaagaactgcaccaaactcaaatccctggatatcggcaaatgccctttggtatccgacacgggcctggagtgcctggccctgaactgcttcaacctcaagcggctcagcctcaagtcctgcgagagcatcaccggccagggcttgcagatcgtggccgccaactgctttgacctccagacgctgaatgtccaggactgcgaggtctccgtggaggccctgcgctttgtcaaacgccactgcaagcgctgcgtcatcgagcacaccaacccggctttcttctgaagggacagagttcatccggcg

SEQ ID NO: 15529 - DNA, 1238 bp, Homo sapiens
gcggcccaaaggcaccggacgttggggccaagatgacctccgcgctgccatgaaccaggccattggacgcgggctccgcgccgagcctgcagtcctcgaggagtctctcgggttcctccgttttgatcacaccttctcggatggctgccgggcttttgcctgccccgccttgcatcgagtctctcatgacctcctccgcctccagcttgcccttctcgtcccctcggaagtagccgagggccggcccggggccttccaacttgaccaccctggaggctctaggaccggtttcgacggcccctcgaggccccactgactgatccaggctgggccccagcttctgcttcttggccttgacatgcagcgccaggggctgcaccgggtgcaactcgggcctggaggtggcgccgtctgacgctgtcggcggctgcaggagccgcaggtcgggcctgaactgcaacagccgcgcctgcgcggacgaggcagcggcttcctcgttctgggcctgaggctgtggtagcagcaacacctgctctggcttcacctgcagcagccgccgcaccgcgggctgtaagccggacgccactgcctccccgcacgacgaggccaaggtcgcactggctgccgcgctcagtgtgggagacgacggagggggctccatggctgctgcccaaaaggaggtgccctcgaccggcagcgggggcggagcgggacgcaacgggcgcggctgaggcggcggctcgggtctggctctctccatgggggagggggacgccccggccaggattgtgagctcagccgtttgttggcgaccttccccctccccctttcggttaagagccttgcaaggcctttgctacccagaaccctacgcggttcaaaacgcagctgtctgtctgggcctcacccaatcacaacgaccgatacccgtggacggccaatcacaggcgggttttccggctcttcctggtccctactctcgcctcgtgctgagtcctcgaatcacctgccatggtaggagccgccgcacttgttgcacattttcgttctgactctcttgtggagttctcttacagccgttgtctttagtcatccctcccccacccggagctgcgacaatggcgttgcccaggaaacgttgcgcttccaggccgctgacatccagggaatgaagtcttgcgtcacaaggggagcgacggccttgtgcacgcgctctgtgcggcctgagtaatctgtcg

SEQ ID NO: 15530 - DNA, 220 bp, Homo sapiens
acgctcatcgtctcgcaggcagctccagctcgagtggtggccgtgctgggtctgtgcccggggccttcccccgtatgctttcgctttctagtgtctgcgatgacgtgcgattcactaatcacccggactcagcgcatctctatgttaaatagcgcgtgtccatctgcaaagcacacgacagcccctgcggccactgggtgccggcgcccagcctgtcccg

SEQ ID NO: 15531 - DNA, 631 bp, Homo sapiens
gcggtgaggggtgatttcggaggaggcagagccccgggtgtccgtgggaagctccaaagccgggccgcgggacggctaccctgggctgtgacgcagtccaggatcttcgccaaggcacctgctggaggcccctcctgggtcccacgaccccgactgcgcctgccggctgccagcgaggaggcggggccaaggcgagggcggggccgaggcaggaggggcggggtcggcctgatgggcggggcttccgtgtgggcggggctgctggccctgcggtctgagccagcggggagaggcccgggcggaggaggctgcggactcctagaggttcagtgccggaagttgggcctggaaagggggcaccgccttcccggttctggtggcggggagtgaggggacgggcgaaagcggcacagggaacagcatgacacgggcctgaggcagggcacatttggaaaggggcgaggagagggcagtggcttctggcacggcagcagtgggcatacagaggcagtcgggacccgtctggaagagcctccgcccggggtaaggagccgggactgtgtctaggaggcagtggggagctccggagagcgaagcgcctcctgcgcagactcgcgtgcttggagtaccg

SEQ ID NO: 15532 - DNA, 904 bp, Homo sapiens
acggcgtctgcctctcgctcttggagtgctcctggcctaacgcagcagtttcgcagataaacgttacagaaggtagagcgctctacagatatgaaggagtggcccgtggtttcacgtagaacaaattacttccggcagaaagatcaggaaagtttcgaaatcgcggagttctcaagggatgggcagaacgggcgggtgagcagggccaagcgcctcctggacagtgaccatcccggagcctggggacgcgctggggggcaggagctgtcccactcgttcaggcgagggtctgggaagggaccccaagcgggaggccgacgctgcctgggtcctcccttggggcggccgcctccccattcaccccgagcatcccgaaacctggaaaggagcaaagctgaagcgatggccacgtgcatgacggcaggcagcctgcagattcgttgttaaactacactcacgccgggtctaacaggcgcgcacctgccggcacgccgcccgctgctgtgacctgggcagcgtcgggtctcaggcccccgcctctcgcgctgtgacagtgagaagccgagaaagtcatgtcacgtccgtctgaggaggcagctcctcagtgtggcagaaagaaatgcccactctccgagcaccagccaggacgtgtgcttaagccaacctgttcattcttccacctgatcccttatgtaatgtaacatgcatgtttcatccacaaaaatgagcagcgaaatccaccgacccagcaacatgttccgagacacgcaggagccttttccacggagccagctcccggccttcccctccaacatccaccccgcgctcgcgtagcccgggctcctgccattgcgctgccagctgggcggcacctttcaggcggggaaaagcgaatcttctgccg

SEQ ID NO: 15533 - DNA, 519 bp, Homo sapiens
acgtcactctctgggggcgcggtggggctgggcagggagcgcggcgcgtgtctgacacccatggctggttccctcccgccctccacagctgttcatggtggacaacggggctgatgactggcgcatcgccatgacctgcgagcgcgtgttcctcatctcgctagagctggcagtgtgcgccattcacccggtgcccggccactaccgcttcacgtggacggcgcggctggccttcacgtacgcgccctcggtggccgaggccgacgtggacgtgctgctgtccatccccatgttcctgcgcctctacctgctgggccgggtgatgctactgcacagcaaaatcttcacggacgcctcgagccgcagcatcggggccctcaacaagatcaccttcaacacgcgcttcgtcatgaagacactcatgaccatctgccccggcaccgtgctgctggtcttcagcatctcctcctggatcatcgcagcctggaccgtgcgcgtctgcgagaggtgcgaccgccg

SEQ ID NO: 15534 - DNA, 204 bp, Homo sapiens
ccgccgccagcccagccgtccgccactctccccagtggtgcccctgccaccaatgggccccccacaaccgactcggcccacgggctgcagatgctgcggaccattggcgtggggaagtatgagttcaccgacccggggcaccccagaggtaagtcctgctgccacgtgcctccccacgggcctgcgtctgcacctccctgcgcg

SEQ ID NO: 15535 - DNA, 444 bp, Homo sapiens
ccggccttcgtgcagatggacgtgaggaacgccattgtcctcttctccctctctgctgccggcgtcacgcaggagctggccatctcccgccggcagcgccgcgtcccggggaacctgatgggctcctacaggtcggtgggggtggagacaggggagacgaagaaggagggggcagcccgctcaggaggccaggggggcatccgtgcccggctcaggcccatcgacgcagacaccattgacatttacgcccgcgctgtgttccctgcggcgtttgcggccgtcaatgtcatctactgggcggcatacgccatgtgagcacaggactcaggccaccctcgcttgtcctggcgcccggcggcagctgcccagaaacttcctgggagaaagagccctcgggctgccttcccctctgcgtgtttcgaagtgggatgacagtcggccacg

SEQ ID NO: 15536 - DNA, 397 bp, Homo sapiens
acgcgccctgcccaccacgaggcctgtaccctctgggcagcaggtgccgcgcgcccccgggtaccttgtaggtggagccgtcggcgcagcgcagcaccccgtgtccctgacgccggtcccggacccagtcgccgtcgtacttgtcaccgttcctgggggacacacgcacggagtccactctcaacagggggagccgggtggtggcagtgactcagaccggctcctcccaccgggctccgcaggcactgcgggaccgaggcaaaaataggcccgagcagatggccccaagagctcctgcctcgccagggccagctgggggccgacgacaggcggtggggacacgtccgcccacccccaccctagatggtaggcctgctcgggacgcactcagcttccg

SEQ ID NO: 15537 - DNA, 1530 bp, Homo sapiens
acgcatggaatcttcgagcctggagaacgtgctggagccctgcgcctacgcccccacctacgtggtcaaggacttcccgatcgccagataccagggcctgcaatttgtgagtgcggctggagaccccgtctcccgtccgggactccgcggagccttctccagccccttgggaggccgccccgggaggtccgcgccctgagccctgcgcccccccaccccccaggtgtacctgtccttcgtttatcccaacgactacactcgcctcacccacatggagacggacaacaagtgcttctaccgcgagtctccgctgtatctggagaggtgggcgcgcggccgggctaatgcggggcggggtgggcggggcgggactcggctctgatgccccgccgcgccccaggtttgggttctataaatacatgaagatggacaaggaggagggggatgaggatgaagaagacgaggtgcagcgccgagccttcctcttcctcaacccggacggtgagtgtccgcagcgcccctggcccgcacccacctgcgcagggagcttctaacccgcgtttcccgcagacttcctggacgacgaggacgagggggagctgctcgacagcctggagcccaccgaggcggccccgcccaggagcggcccccagtcccccgccccagcagcccccgcccagcccggagccaccctcgccccgccgacccctccccgcccccgggacggggggacccccaggcactcccgggccctgagctgggccgccagggccgcccgccctttgccgctcttcttgggccgagctccgcccccgcgccctgcagtggagcagccgcccccaaaggtgtacgtgaccagggtgcggccgggacagcgggcatccccccgggccccagcgccgcgtgcgccctggccgcccttccctggcgtcttcctgcaccccaggcctctgcccagagtgcagctgcgggcgcccccacgcccaccccggccccacggccgcaggaccggcggcccccaggccacacagccgaggcccccagcccgggcgcaggccacccaagggggccgggagggccaggcgcgcacgctgggacctgcggcgcccacagtggactcaaacttgtcctccgaagcgcggcccgtgacctccttcctgagcttgtcccaggtgtccgggccgcagctgcccggggagggcgaagaggaggaggaaggggaggacgatggggccccgggcgacgaggccgcgtcggaggacagcgaggaggccgcgggcccggcgctcggacgctggcgtgaggacgccatcgactggcagcgcacgttcagcgtgggcgccgtggacttcgagctgctgcgctcggactggaacgacctgcgatgcaacgtttcggggaacctgcagctgccggaggcggaggccgtggacgtgaccgctcagtacatggagcggctgaacgcgcgccacggcgggtatgggggcggccgaacgcgcgccagggcggttttggaggcggggacagccg

SEQ ID NO: 15538 - DNA, 414 bp, Homo sapiens
cgtgtcagcgccaggctggacccagcgagccgccgatgccagcgagatgccaggctggactcagcaagccgccgatgccagccagacgcagagcagagaacgctggtcaaagagcagctaggcggtgtctgctcggccgaagcccagtcccggagaggcaggctctgtaccaggacgtggaggctccggggtcatgaaacccccagggtgagagacaaaggtagtgagtggccgtccagggcagaggggacggaggcagcacgcggacggagcctccgcacagagcgtcacggccacgactggaaagctcagacacgtgtcacgagcccacagcccaggtcagaggcggcaggatggcgggcggccccatgcacagaactgcggccacgtgtggaaggcgacggacactggcgg

SEQ ID NO: 15539 - DNA, 987 bp, Homo sapiens
cgaggagcccgcgccctcaggactggactgacccaccttgaggttgacgatgggcacggctgcgcggtcggcacggcgcacgatgctgtacaggtcctgcaggcgcgaggacaggaaggcgcggaaggtgcccgccagccccacggcccgcgcctgctggaagcactggaagtcggccccgcggatgccccgcatgccgcctgacagggggctgttgagcgcaaccaggtggagctgcggggagaggggcgcgtcacgggctgtgtcccacgctgccccctgcacccaggccccgggcgcaccaccccggccccgcacctgtgtggacaggcacggccgaggggcgctgagcgggaggcgcgcaagtgacacactgaggggcccaggcagcagcccccatacgctgccaggtcagagcagccccgggccacgtgggtgcccccagctgccgctgtaggcggaggtacgccggttcctcaaggatgtgacagcggctggactttcatgaccactgcttggccaccagagggcaagtcccagggccagccaagccgccctgagtggccctgagccgccagacccccacccatggccgaagcctgggacccccagcagctctgcaggggctgggccctcttctgctgccgagagccgaggggctagatggagccaagcccactttgggggggcactcaccaccggctggaagtcgcggtggctgtgggcgggtgggcttgtgggtcgcgccggccgcaggtgcacgtaggagctgtggtgcggggctccggggtagggctggggctcgggcaggcgaggggggctggccaggatgtcatctgcccgccagggccgcgcggtggggtgggggtgctcccgccgcgggtaggggttgctgtcgtgcagctgcaccacggggggctgcaaggcggccacttcattgtcctgcaggtgggagacgtggggcctgtcggcggggggaccctccgg

SEQ ID NO: 15540 - DNA, 1061 bp, Homo sapiens
cggggcagggggcggctgccgcaagggtgggacccgcgggttccgaggctttcctggtggtggagacgcgccgaggccgtttccactccaagccccttttccaggtggtgagccggctgggcctggactccctgtgccccttcagccctaaggagcggatcatcgagtgagcctctgccctcccgccctcttctcacccctcccgggctctgcctctcgggccttgcggggcgctggggtccctgcgtggagacccggctgagtcctcccagcgcctccctttgggcgcctactcggcctgcgccaagccggggtctgggggctgaggggggcacagagaccccggccgggtccccgcaggttctcagccgagtggtcacctccccgtgggtgcagacgggcgtggggcctggggccgccccgggaggactgcgctccccccaccaaccccggccagacccgctgagccgcgcccaccctgcaggtacctggtccctgagcgcgggcctgagcgaggcctgggcagcaagtccctgcgcgccttcgtgggggaggtgggtgcccgctctgcggcccccgggggcggctcggtggcggcggccgctgcggccatggtgagcgcggggggaggggcaggggaggcgcagttgttggggggagggcggggagggggaagggcgctgttggggggagggcacggggtggggagggcgcggtggggccgccctgggtggagacgtgggggccacacgggtgggacccccgcagggatcacccgggcccctggctcttcctggggtcggtcccgggccgtctggggtccctgcgacccccacatccacccctctcgcagggtgcggcgctgggctccatggtgggcctcatgacctacgggcggcgccaattccagtccctggacacgacgatgcggcgcctgatcccgcccttccgcgaggcttcggccaagctaaccacgctggtggatgccgacgccgaggccttcaccgcctacctggtgagtggcggccacagcagggctccccgggccccaccaacagcga

SEQ ID NO: 15541 - DNA, 382 bp, Homo sapiens
cggacggtaaacacgcgtgggtttcccgtgtgcctgacggtaaagatgcatgggcctcctgtgtgccggatggtaaacaggccccgtgtgggtctcctgtgtgccggacagtaaacacacgtgggtcttccctgtgccggacagtaaacacacgtgggtctcccctgtgccggacagtaaacacgcgtgggtctccctgtgccggacagtaaacacgcgtgggtctcccctgtgccggacagtaaacacgcgtgggtctccctgtgccaaacggtaaacacgcgtgggtctctcgtgtgccgaacagtaaacacgcgtgggtctcccctgtgcccgacagtaaacacgcgtgggtctcccgtgtgccggatgataaacacgc

SEQ ID NO: 15542 - DNA, 261 bp, Homo sapiens
cgtcgattaggaggatcggtggcgacctcggccttcagtgtctccgacagagtgaaatggcggcggcggccgggatgatgctgctgggcttgctacaggcgggtgggtaggtgctgggccaggcgatggaggaggtggcaggcggcaacctcttgtccatgctgctgatcgcctgcgccttcaccctcagcctggtctacttgttccgtctcgctgccggccacctggtccagctgaccgcaggggcgaaaagtcctccgt

SEQ ID NO: 15543 - DNA, 892 bp, Homo sapiens
cgcggggctgtttaagcgttggcggaggccgggctgggtcgctgtgcgtctgctcctccttctcgcgcttctcctgccgccctaatcctgccttggccacgagggagcttgtgctcacgcagaccgggcagtgcgggaaccagatcggcgccaaggttggcagccggggctctgagggcccagcccgggcctgccgggtggccggggaagatgttggcagcggcgggggcggtgcccctgcattgcggcccctgggctccctgccggggacggtggaaccgggtggctggcgaggcggcgggggtggaccccagggacagggcggcctggggatgggggtgcggatgggggtgggagagcggctggggcgcctccgtgactcagccccggcctgtctggcccctcccgtctccgcagttctgggaggtgatctctgatgaacatgccatcgactccgctggcacctaccacggggacagccacctgcagctggagcgcatcaacgtgcaccaccacgaggccagcggtgcgacccccgtccttcccccaccgccctcctgggaacgcggccctcccctcgctcatgccctcccgccccacgcaggtggcaggtacgtgtcccgcgctgtgctcgtggatctggagccgggcaccatggactctgtgcgctcggggcccttcgggcaggtcttcaggccagacaacttcatttcccgtgagctgcgggcgaggactggggtgcggctccttagccagggcagctcgaaatccaggaacgctccaaggtcatcctgtgggaactgtggcgccagggcccctgaacaccctcctgtcctccgagtcgagtcgctccatctgcctcctaaacgggcttcgggaggaaggcccgcgt

SEQ ID NO: 15544 - DNA, 682 bp, Homo sapiens
cgcccagcaggcggcattgcgccctgacgccggggacccagcacccagccgtcctcgcccgcaggtgccctggctctgccccggccctccctggtctgtgtcctgactctgtttcccgtcgcccagaacgccgcagccagggcggcacacaagcctcgaggggcggggtccgggggcccctcttccatccgcctttcgtctccctccctgctggatctgaggcgccgctcccgccgcgctgtcctcgcgccatgccacgtcacgtcacgtcacgtcacgttacgttcccacgtcacgtccacgtcacgttcccacttcccgtccacagggaaacgggccccggcgatgtgagggcgtctgccgtgcttggtgccttcacaggggagcttcctgccttggccgcggttccaggctctgtgctgacgcagcaggagggtccccgggcagcccaggcaggcgacggggagtgacgagggtccttcacagccatgggagccgagcccagagcaggcggcagcagcgtctttgccacccctggcctaaaagcagccgtgtggggcccctgacaggtgccccggagcgaactgccctccttggcccagccctcagggtcctgccagggcccttgctgcccagaaggcccggggcccggctgacgacccgctacaccgtgggcccccgg

SEQ ID NO: 15545 - DNA, 223 bp, Homo sapiens
cgaaaaacagaggcgctgggtgcgaggcggagagatgcacaggtctggtcccggccccgccctttgcctgttctaaagggcaaggtctctccgcctcgcgccccgcctctgtcccacccaggccccgccaccatgttcgggggccccacccgggactggcttctgtcctgcgcagcaaacccggaagtggatcacgtggagtaaaggtcctaccgaggcgcgt

SEQ ID NO: 15546 - DNA, 255 bp, Homo sapiens
cgggaggccgggttcggtgcatgggggccgggcacactttctctgggcatccctaggacaggcgaggaacgcatcggccgggactccacctacgagcaggagggcaaggtgcagtttgtgattgatgcggtgtacgccattgcccacgccctccacagcatgcaccaggcgctctgccctgggcacacaggcctgtgcccggcgatggaacccactgatgggcggatgcttctgcagtacattcgagctgtccgc

SEQ ID NO: 15547 - DNA, 309 bp, Homo sapiens
cggcaggtttgctgcgctcgtcccagccagggcccagagtccctcggccagtttatcgcatctggaccccagatgggcgcgttgggtggtgcccgcgccagggaaagagctggcggctggctgagttgctgcgttcctgagcgctgtgcccgttgtgaccattggcgtggctgtctcccggcaggctcgaaggaatcgctgttctcctgcacgctgacggccagcgaggaggccatggcggtgctggaggaggtggtgctgtacgccttccagcagtgcgtctactatgtctccaaggtgcacggacgg

SEQ ID NO: 15548 - DNA, 992 bp, Homo sapiens
cgtgtgctcctccgggaaaccgacctcctctgggatgggcccggacatcgaggggcgggttcctgagagccgtcggggttctggtgtgggggtggccagggacatggagagcccgtggcgacagcatcccagccacgctgcttcagcaaccagtgactagacacgggacgcttttcccgtgtgctgctcgcgttacgcctgccctgagcggagtctctgtttcaggacagcctggtgtatgtgctcaaccgggaccggcacacggtgggccagcggaccccctccagcaagcccagcatcagcctctcagcccccgacatcctgcctctacactgcaccatccgccggcaaccgctcccggacagcggccaggccgcggggaggctggtcctggagcccatccccggggcgcacatctccgtcaacttctccgaggtggggcacaggaccgtggtgctgcaccacggggacctgctctccctggggctctactacctgctgctattcaaggaccccgcgcaggcccagcccctgcccgcccgggccttggcgcgcctccgggctgtgccgcagagctgccggctgtgcggggccgcgctcggggcccggggagccgcctcccctactcaggccgccctgccccggcgccagcagctgctcctggagtttgagccccacctggaggacacgctgctgcagaggatcatgacgttgatcgagccggggggcgacgaccacaagctgacccccgccttcctcctgtgcctctgcatccagcactcggccacccacttccagccgggcacattcgggcagctcctgctcaagatagccaggctgatccgcgagactgtctgggtcagtgtgctggggtgggcggtctgggtcctgtgccggtctgggggaagagggggcccggagctggccccggctgggaggcgggagcgcctctatctgacccccacggtgctgtgctgctgagcgcagggcgg

SEQ ID NO: 15549 - DNA, 265 bp, Homo sapiens
cggggctgcccgtgaacacgccaagcacaacggggctgctgaccgtgaacacgccgaataaaacagggctgctgcccgtgaacacgccaaacaaaatggggctgctgcccgtgaacatgccgaataaaactgggagtccgaacctcttcatgtcaaataaagagtagggtccgaacctcttccccaggagggccagggttgcggccgggcgacgccaggtggggaagacactagaagaggagaaaaccaggagcgcaggacgcgg

SEQ ID NO: 15550 - DNA, 488 bp, Homo sapiens
cgcccgtgtctggcgggagaggacacggtctcctaggcgcgctgtagaagctgactggagaaggcccgcgactctgctgagggttaaagaggaatcggaaagggcccggggtagacgtgggcgccacagggtgagccgggccaggctgagaggactcacgggctatgggagcttgtgggcgacggtccggcaggggcctgcggcgggaacagggacaaaatatacttaataaattgcccatttagagcaagttgtgtgggtacaatggcgagaaaacggtcagtaatggagacgctgctccgtagtcgcccacttctctttctccaggcgcgcactggacggctgagcgattgtgaggccccagtggggctggtgacagaaccaaggcgcgccgaagcgcgcggcagcacccccgccctagggcgcctaccagaggggtaaaagggcaaaagagagagcccctcccccaccacgcccgcctccgccgg

SEQ ID NO: 15551 - DNA, 676 bp, Homo sapiens
cgccggatgaactctgtcccttcagaagaaagccgggttggtgtgctcgatgacgcagcgcttgcagtggcgtttgacaaagcgcagggcctccacggagacctcgcagtcctggacattcagcgtctggaggtcaaagcagttggcggccacgatctgcaagccctggccggtgatgctctcgcaggacttgaggctgagccgcttgaggttgaagcagttcagggccaggcactccaggcccgtgtcggataccaaagggcatttgccgatatccagggatttgagtttggtgcagttcttggcgaggtactccacaccgtggtccgtgatgccctcgcagcccctcgcgttgaggtagcgcagcttgctgcagtacttggccacgtagcggatgcccacgtcggtgacccggccgcagtgcgcgatgctcaggtaccgcaggcgggactccagcttggcgatctcccgcaggccgaagtcgctgacgaagcggcagtcgctgacgctcagctccttgatggaggcgcagtagatcaccaggtagcgcaggccttcgtcggtcaggcggacgcagcggcgcaggtagaggtgggtgagctgcgtgcagtgcgccgcgatggtgtgcaggccttcgtcctccagcacgaagcagtccgtcatgtccaggtagcgg

SEQ ID NO: 15552 - DNA, 1238 bp, Homo sapiens
cgacagattactcaggccgcacagagcgcgtgcacaaggccgtcgctccccttgtgacgcaagacttcattccctggatgtcagcggcctggaagcgcaacgtttcctgggcaacgccattgtcgcagctccgggtgggggagggatgactaaagacaacggctgtaagagaactccacaagagagtcagaacgaaaatgtgcaacaagtgcggcggctcctaccatggcaggtgattcgaggactcagcacgaggcgagagtagggaccaggaagagccggaaaacccgcctgtgattggccgtccacgggtatcggtcgttgtgattgggtgaggcccagacagacagctgcgttttgaaccgcgtagggttctgggtagcaaaggccttgcaaggctcttaaccgaaagggggagggggaaggtcgccaacaaacggctgagctcacaatcctggccggggcgtccccctcccccatggagagagccagacccgagccgccgcctcagccgcgcccgttgcgtcccgctccgcccccgctgccggtcgagggcacctccttttgggcagcagccatggagccccctccgtcgtctcccacactgagcgcggcagccagtgcgaccttggcctcgtcgtgcggggaggcagtggcgtccggcttacagcccgcggtgcggcggctgctgcaggtgaagccagagcaggtgttgctgctaccacagcctcaggcccagaacgaggaagccgctgcctcgtccgcgcaggcgcggctgttgcagttcaggcccgacctgcggctcctgcagccgccgacagcgtcagacggcgccacctccaggcccgagttgcacccggtgcagcccctggcgctgcatgtcaaggccaagaagcagaagctggggcccagcctggatcagtcagtggggcctcgaggggccgtcgaaaccggtcctagagcctccagggtggtcaagttggaaggccccgggccggccctcggctacttccgaggggacgagaagggcaagctggaggcggaggaggtcatgagagactcgatgcaaggcggggcaggcaaaagcccggcagccatccgagaaggtgtgatcaaaacggaggaacccgagagactcctcgaggactgcaggctcggcgcggagcccgcgtccaatggcctggttcatggcagcgcggaggtcatcttggccccaacgtccggtgcctttgggccgc

SEQ ID NO: 15553 - DNA, 220 bp, Homo sapiens
cgggacaggctgggcgccggcacccagtggccgcaggggctgtcgtgtgctttgcagatggacacgcgctatttaacatagagatgcgctgagtccgggtgattagtgaatcgcacgtcatcgcagacactagaaagcgaaagcatacgggggaaggccccgggcacagacccagcacggccaccactcgagctggagctgcctgcgagacgatgagcgt

SEQ ID NO: 15554 - DNA, 631 bp, Homo sapiens
cggtactccaagcacgcgagtctgcgcaggaggcgcttcgctctccggagctccccactgcctcctagacacagtcccggctccttaccccgggcggaggctcttccagacgggtcccgactgcctctgtatgcccactgctgccgtgccagaagccactgccctctcctcgcccctttccaaatgtgccctgcctcaggcccgtgtcatgctgttccctgtgccgctttcgcccgtcccctcactccccgccaccagaaccgggaaggcggtgccccctttccaggcccaacttccggcactgaacctctaggagtccgcagcctcctccgcccgggcctctccccgctggctcagaccgcagggccagcagccccgcccacacggaagccccgcccatcaggccgaccccgcccctcctgcctcggccccgccctcgccttggccccgcctcctcgctggcagccggcaggcgcagtcggggtcgtgggacccaggaggggcctccagcaggtgccttggcgaagatcctggactgcgtcacagcccagggtagccgtcccgcggcccggctttggagcttcccacggacacccggggctctgcctcctccgaaatcacccctcaccgc

SEQ ID NO: 15555 - DNA, 904 bp, Homo sapiens
cggcagaagattcgcttttccccgcctgaaaggtgccgcccagctggcagcgcaatggcaggagcccgggctacgcgagcgcggggtggatgttggaggggaaggccgggagctggctccgtggaaaaggctcctgcgtgtctcggaacatgttgctgggtcggtggatttcgctgctcatttttgtggatgaaacatgcatgttacattacataagggatcaggtggaagaatgaacaggttggcttaagcacacgtcctggctggtgctcggagagtgggcatttctttctgccacactgaggagctgcctcctcagacggacgtgacatgactttctcggcttctcactgtcacagcgcgagaggcgggggcctgagacccgacgctgcccaggtcacagcagcgggcggcgtgccggcaggtgcgcgcctgttagacccggcgtgagtgtagtttaacaacgaatctgcaggctgcctgccgtcatgcacgtggccatcgcttcagctttgctcctttccaggtttcgggatgctcggggtgaatggggaggcggccgccccaagggaggacccaggcagcgtcggcctcccgcttggggtcccttcccagaccctcgcctgaacgagtgggacagctcctgccccccagcgcgtccccaggctccgggatggtcactgtccaggaggcgcttggccctgctcacccgcccgttctgcccatcccttgagaactccgcgatttcgaaactttcctgatctttctgccggaagtaatttgttctacgtgaaaccacgggccactccttcatatctgtagagcgctctaccttctgtaacgtttatctgcgaaactgctgcgttaggccaggagcactccaagagcgagaggcagacgccgt

SEQ ID NO: 15556 - DNA, 519 bp, Homo sapiens
cggcggtcgcacctctcgcagacgcgcacggtccaggctgcgatgatccaggaggagatgctgaagaccagcagcacggtgccggggcagatggtcatgagtgtcttcatgacgaagcgcgtgttgaaggtgatcttgttgagggccccgatgctgcggctcgaggcgtccgtgaagattttgctgtgcagtagcatcacccggcccagcaggtagaggcgcaggaacatggggatggacagcagcacgtccacgtcggcctcggccaccgagggcgcgtacgtgaaggccagccgcgccgtccacgtgaagcggtagtggccgggcaccgggtgaatggcgcacactgccagctctagcgagatgaggaacacgcgctcgcaggtcatggcgatgcgccagtcatcagccccgttgtccaccatgaacagctgtggagggcgggagggaaccagccatgggtgtcagacacgcgccgcgctccctgcccagccccaccgcgcccccagagagtgacgt

SEQ ID NO: 15557 - DNA, 204 bp, Homo sapiens
cgcgcagggaggtgcagacgcaggcccgtggggaggcacgtggcagcaggacttacctctggggtgccccgggtcggtgaactcatacttccccacgccaatggtccgcagcatctgcagcccgtgggccgagtcggttgtggggggcccattggtggcaggggcaccactggggagagtggcggacggctgggctggcggcgg

SEQ ID NO: 15558 - DNA, 444 bp, Homo sapiens
cgtggccgactgtcatcccacttcgaaacacgcagaggggaaggcagcccgagggctctttctcccaggaagtttctgggcagctgccgccgggcgccaggacaagcgagggtggcctgagtcctgtgctcacatggcgtatgccgcccagtagatgacattgacggccgcaaacgccgcagggaacacagcgcgggcgtaaatgtcaatggtgtctgcgtcgatgggcctgagccgggcacggatgcccccctggcctcctgagcgggctgccccctccttcttcgtctcccctgtctccacccccaccgacctgtaggagcccatcaggttccccgggacgcggcgctgccggcgggagatggccagctcctgcgtgacgccggcagcagagagggagaagaggacaatggcgttcctcacgtccatctgcacgaaggccgg

SEQ ID NO: 15559 - DNA, 397 bp, Homo sapiens
cggaagctgagtgcgtcccgagcaggcctaccatctagggtgggggtgggcggacgtgtccccaccgcctgtcgtcggcccccagctggccctggcgaggcaggagctcttggggccatctgctcgggcctatttttgcctcggtcccgcagtgcctgcggagcccggtgggaggagccggtctgagtcactgccaccacccggctccccctgttgagagtggactccgtgcgtgtgtcccccaggaacggtgacaagtacgacggcgactgggtccgggaccggcgtcagggacacggggtgctgcgctgcgccgacggctccacctacaaggtacccgggggcgcgcggcacctgctgcccagagggtacaggcctcgtggtgggcagggcgcgt

SEQ ID NO: 15560 - DNA, 1530 bp, Homo sapiens
cggctgtccccgcctccaaaaccgccctggcgcgcgttcggccgcccccatacccgccgtggcgcgcgttcagccgctccatgtactgagcggtcacgtccacggcctccgcctccggcagctgcaggttccccgaaacgttgcatcgcaggtcgttccagtccgagcgcagcagctcgaagtccacggcgcccacgctgaacgtgcgctgccagtcgatggcgtcctcacgccagcgtccgagcgccgggcccgcggcctcctcgctgtcctccgacgcggcctcgtcgcccggggccccatcgtcctccccttcctcctcctcttcgccctccccgggcagctgcggcccggacacctgggacaagctcaggaaggaggtcacgggccgcgcttcggaggacaagtttgagtccactgtgggcgccgcaggtcccagcgtgcgcgcctggccctcccggcccccttgggtggcctgcgcccgggctgggggcctcggctgtgtggcctgggggccgccggtcctgcggccgtggggccggggtgggcgtgggggcgcccgcagctgcactctgggcagaggcctggggtgcaggaagacgccagggaagggcggccagggcgcacgcggcgctggggcccggggggatgcccgctgtcccggccgcaccctggtcacgtacacctttgggggcggctgctccactgcagggcgcgggggcggagctcggcccaagaagagcggcaaagggcgggcggccctggcggcccagctcagggcccgggagtgcctgggggtccccccgtcccgggggcggggaggggtcggcggggcgagggtggctccgggctgggcgggggctgctggggcgggggactgggggccgctcctgggcggggccgcctcggtgggctccaggctgtcgagcagctccccctcgtcctcgtcgtccaggaagtctgcgggaaacgcgggttagaagctccctgcgcaggtgggtgcgggccaggggcgctgcggacactcaccgtccgggttgaggaagaggaaggctcggcgctgcacctcgtcttcttcatcctcatccccctcctccttgtccatcttcatgtatttatagaacccaaacctggggcgcggcggggcatcagagccgagtcccgccccgcccaccccgccccgcattagcccggccgcgcgcccacctctccagatacagcggagactcgcggtagaagcacttgttgtccgtctccatgtgggtgaggcgagtgtagtcgttgggataaacgaaggacaggtacacctggggggtgggggggcgcagggctcagggcgcggacctcccggggcggcctcccaaggggctggagaaggctccgcggagtcccggacgggagacggggtctccagccgcactcacaaattgcaggccctggtatctggcgatcgggaagtccttgaccacgtaggtgggggcgtaggcgcagggctccagcacgttctccaggctcgaagattccatgcgt

SEQ ID NO: 15561 - DNA, 414 bp, Artificial Sequence
  Description of Artificial Sequence: Synthetic polynucleotide
tygttagtgttygtygttttttataygtggtygtagttttgtgtatggggtygttygttattttgtygtttttgatttgggttgtgggttygtgataygtgtttgagttttttagtygtggtygtgaygttttgtgyggaggtttygttygygtgttgttttygttttttttgttttggayggttatttattatttttgttttttattttgggggttttatgatttyggagtttttaygttttggtatagagtttgttttttygggattgggtttyggtygagtagatatygtttagttgttttttgattagygttttttgttttgygtttggttggtatyggyggtttgttgagtttagtttggtatttygttggtatyggyggttygttgggtttagtttggygttgatayg

SEQ ID NO: 15562 - DNA, 987 bp, Artificial Sequence
  Description of Artificial Sequence: Synthetic polynucleotide
tyggagggttttttygtygataggttttaygttttttatttgtaggataatgaagtggtygttttgtagtttttygtggtgtagttgtaygatagtaatttttattygyggygggagtatttttattttatygygyggttttggygggtagatgatattttggttagtttttttygtttgttygagttttagttttatttyggagtttygtattatagtttttaygtgtatttgyggtyggygygatttataagtttattygtttatagttatygygatttttagtyggtggtgagtgtttttttaaagtgggtttggttttatttagtttttyggttttyggtagtagaagagggtttagtttttgtagagttgttgggggttttaggtttyggttatgggtgggggtttggyggtttagggttatttagggyggtttggttggttttgggatttgttttttggtggttaagtagtggttatgaaagtttagtygttgttatatttttgaggaatyggygtattttygtttatagyggtagttgggggtatttaygtggttyggggttgttttgatttggtagygtatgggggttgttgtttgggttttttagtgtgttatttgygygtttttygtttagygtttttyggtygtgtttgtttatataggtgyggggtyggggtggtgygttyggggtttgggtgtagggggtagygtgggatatagttygtgaygygttttttttttygtagttttatttggttgygtttaatagttttttgttaggyggtatgyggggtattygyggggtygatttttagtgtttttagtaggygygggtygtggggttggygggtatttttygygtttttttgttttygygtttgtaggatttgtatagtatygtgygtygtgtygatygygtagtygtgtttatygttaattttaaggtgggttagtttagttttgagggygygggtttttyg

SEQ ID NO: 15563 - DNA, 1061 bp, Artificial Sequence
  Description of Artificial Sequence: Synthetic polynucleotide
tygttgttggtggggttyggggagttttgttgtggtygttatttattaggtaggyggtgaaggtttyggygtyggtatttattagygtggttagtttggtygaagtttygyggaagggygggattaggygtygtatygtygtgtttagggattggaattggygtygttygtaggttatgaggtttattatggagtttagygtygtattttgygagaggggtggatgtgggggtygtagggattttagayggttygggatygattttaggaagagttaggggttygggtgatttttgygggggttttattygtgtggtttttaygtttttatttagggyggttttatygygttttttttatttygtgttttttttttaatagygttttttttttttttygttttttttttaataattgygttttttttgttttttttttygygtttattatggtygtagyggtygtygttatygagtygttttygggggtygtagagygggtatttattttttttaygaaggygygtagggatttgttgtttaggtttygtttaggttygygtttagggattaggtatttgtagggtgggygyggtttagygggtttggtyggggttggtggggggagygtagttttttyggggyggttttaggttttaygttygtttgtatttayggggaggtgattattyggttgagaatttgyggggattyggtyggggtttttgtgttttttttagtttttagatttyggtttggygtaggtygagtaggygtttaaagggaggygttgggaggatttagtygggtttttaygtagggattttagygtttygtaaggttygagaggtagagttygggaggggtgagaagagggygggagggtagaggtttattygatgattygttttttagggttgaaggggtatagggagtttaggtttagtyggtttattatttggaaaaggggtttggagtggaaayggtttyggygygtttttattattaggaaagtttyggaattygygggttttatttttgyggtagtygttttttgtttyg

SEQ ID NO: 15564 - DNA, 382 bp, Artificial Sequence
  Description of Artificial Sequence: Synthetic polynucleotide
gygtgtttattattyggtataygggagatttaygygtgtttattgtygggtataggggagatttaygygtgtttattgttyggtataygagagatttaygygtgtttatygtttggtatagggagatttaygygtgtttattgttyggtataggggagatttaygygtgtttattgttyggtatagggagatttaygygtgtttattgttyggtataggggagatttaygtgtgtttattgttyggtatagggaagatttaygtgtgtttattgttyggtatataggagatttatayggggtttgtttattattyggtatataggaggtttatgtatttttatygttaggtataygggaaatttaygygtgtttatygttyg

SEQ ID NO: 15565 - DNA, 261 bp, Artificial Sequence
  Description of Artificial Sequence: Synthetic polynucleotide
ayggaggatttttygtttttgyggttagttggattaggtggtyggtagygagayggaataagtagattaggttgagggtgaaggygtaggygattagtagtatggataagaggttgtygtttgttattttttttatygtttggtttagtatttatttattygtttgtagtaagtttagtagtattatttyggtygtygtygttattttattttgtyggagatattgaaggtygaggtygttatygatttttttaatygayg

SEQ ID NO: 15566 - DNA, 892 bp, Artificial Sequence
  Description of Artificial Sequence: Synthetic polynucleotide
aygygggtttttttttygaagttygtttaggaggtagatggagygattygattyggaggataggagggtgtttaggggttttggygttatagtttttataggatgattttggagygtttttggatttygagttgttttggttaaggagtygtattttagttttygttygtagtttaygggaaatgaagttgtttggtttgaagatttgttygaagggtttygagygtatagagtttatggtgttyggttttagatttaygagtatagygygggataygtatttgttatttgygtggggygggagggtatgagygaggggagggtygygtttttaggagggyggtgggggaaggaygggggtygtatygttggtttygtggtggtgtaygttgatgygttttagttgtaggtggttgttttygtggtaggtgttagyggagtygatggtatgtttattagagattattttttagaattgyggagaygggaggggttagataggtyggggttgagttayggaggygttttagtygtttttttatttttattygtatttttatttttaggtygttttgtttttggggtttattttygtygtttygttagttattyggttttatygttttyggtagggagtttaggggtygtaatgtaggggtatygttttygtygttgttaatatttttttyggttattyggtaggttygggttgggtttttagagtttyggttgttaattttggygtygatttggttttygtattgttyggtttgygtgagtataagttttttygtggttaaggtaggattagggyggtaggagaagygygagaaggaggagtagaygtatagygatttagttyggttttygttaaygtttaaatagtttygyg

SEQ ID NO: 15567 - DNA, 682 bp, Artificial Sequence
  Description of Artificial Sequence: Synthetic polynucleotide
tygggggtttayggtgtagygggtygttagtygggtttygggttttttgggtagtaagggttttggtaggattttgagggttgggttaaggagggtagttygtttyggggtatttgttaggggttttatayggttgtttttaggttaggggtggtaaagaygttgttgtygtttgttttgggttyggtttttatggttgtgaaggattttygttatttttygtygtttgtttgggttgttyggggatttttttgttgygttagtatagagtttggaatygyggttaaggtaggaagtttttttgtgaaggtattaagtayggtagaygtttttatatygtyggggttygtttttttgtggaygggaagtgggaaygtgaygtggaygtgaygtgggaaygtaaygtgaygtgaygtgaygtgaygtggtatggygygaggatagygyggygggagyggygttttagatttagtagggagggagaygaaaggyggatggaagaggggttttyggatttygtttttygaggtttgtgtgtygttttggttgyggygttttgggygaygggaaatagagttaggatatagattagggagggtyggggtagagttagggtatttgygggygaggayggttgggtgttgggttttyggygttagggygtaatgtygtttgttgggyg

SEQ ID NO: 15568 - DNA, 223 bp, Artificial Sequence
  Description of Artificial Sequence: Synthetic polynucleotide
aygygtttyggtaggatttttattttaygtgatttattttygggtttgttgygtaggatagaagttagtttygggtggggttttygaatatggtggyggggtttgggtgggatagaggyggggygygaggyggagagattttgttttttagaataggtaaagggyggggtygggattagatttgtgtattttttygtttygtatttagygtttttgtttttyg

SEQ ID NO: 15569 - DNA, 255 bp, Artificial Sequence
  Description of Artificial Sequence: Synthetic polynucleotide
gyggatagttygaatgtattgtagaagtattygtttattagtgggttttatygtygggtataggtttgtgtgtttagggtagagygtttggtgtatgttgtggagggygtgggtaatggygtatatygtattaattataaattgtattttgtttttttgttygtaggtggagtttyggtygatgygtttttygtttgttttagggatgtttagagaaagtgtgttyggtttttatgtatygaattyggtttttyg

SEQ ID NO: 15570 - DNA, 309 bp, Artificial Sequence
  Description of Artificial Sequence: Synthetic polynucleotide
tygttygtgtattttggagatatagtagaygtattgttggaaggygtatagtattattttttttagtatygttatggttttttygttggtygttagygtgtaggagaatagygattttttygagtttgtygggagatagttaygttaatggttataaygggtatagygtttaggaaygtagtaatttagttagtygttagttttttttttggygygggtattatttaaygygtttatttggggtttagatgygataaattggtygagggattttgggttttggttgggaygagygtagtaaatttgtyg

SEQ ID NO: 15571 - DNA, 992 bp, Artificial Sequence
  Description of Artificial Sequence: Synthetic polynucleotide
tygttttgygtttagtagtatagtatygtgggggttagatagaggygttttygttttttagtyggggttagtttygggttttttttttttttagatyggtataggatttagatygtttattttagtatattgatttagatagtttygyggattagtttggttattttgagtaggagttgttygaatgtgttyggttggaagtgggtggtygagtgttggatgtagaggtataggaggaaggygggggttagtttgtggtygtygtttttyggttygattaaygttatgattttttgtagtagygtgttttttaggtggggtttaaattttaggagtagttgttggygtyggggtagggyggtttgagtaggggaggyggtttttygggtttygagygyggtttygtatagtyggtagttttgyggtatagttyggaggygygttaaggttygggygggtaggggttgggtttgygyggggtttttgaatagtagtaggtagtagagttttagggagagtaggttttygtggtgtagtattayggttttgtgttttatttyggagaagttgayggagatgtgygtttyggggatgggttttaggattagttttttygyggtttggtygttgttygggagyggttgtyggyggatggtgtagtgtagaggtaggatgtygggggttgagaggttgatgttgggtttgttggagggggttygttggtttatygtgtgtyggtttyggttgagtatatatattaggttgttttgaaatagagatttygtttagggtaggygtaaygygagtagtataygggaaaagygtttygtgtttagttattggttgttgaagtagygtggttgggatgttgtygttaygggttttttatgtttttggttatttttatattagaatttygayggtttttaggaattygtttttygatgttygggtttattttagaggaggtyggtttttyggaggagtatayg

SEQ ID NO: 15572 - DNA, 265 bp, Artificial Sequence
  Description of Artificial Sequence: Synthetic polynucleotide
tygygttttgygtttttggttttttttttttttagtgttttttttatttggygtygttyggtygtaattttggtttttttggggaagaggttyggattttattttttatttgatatgaagaggttyggatttttagttttattyggtatgtttaygggtagtagttttattttgtttggygtgtttaygggtagtagttttgttttattyggygtgtttayggttagtagtttygttgtgtttggygtgtttaygggtagtttyg

SEQ ID NO: 15573 - DNA, 488 bp, Artificial Sequence
  Description of Artificial Sequence: Synthetic polynucleotide
tyggyggaggygggygtggtgggggaggggtttttttttttgtttttttatttttttggtaggygttttagggygggggtgttgtygygygtttyggygygttttggttttgttattagttttattggggttttataatygtttagtygtttagtgygygtttggagaaagagaagtgggygattayggagtagygtttttattattgatygttttttygttattgtatttatataatttgttttaaatgggtaatttattaagtatattttgtttttgttttygtygtaggtttttgtyggatygtygtttataagtttttatagttygtgagtttttttagtttggttyggtttattttgtggygtttaygtttatttygggtttttttygatttttttttaatttttagtagagtygygggttttttttagttagtttttatagygygtttaggagatygtgttttttttygttagataygggyg

SEQ ID NO: 15574 - DNA, 676 bp, Artificial Sequence
  Description of Artificial Sequence: Synthetic polynucleotide
tygttatttggatatgayggattgtttygtgttggaggaygaaggtttgtatattatygyggygtattgtaygtagtttatttatttttatttgygtygttgygttygtttgatygaygaaggtttgygttatttggtgatttattgygtttttattaaggagttgagygttagygattgtygtttygttagygatttyggtttgygggagatygttaagttggagtttygtttgyggtatttgagtatygygtattgyggtygggttatygaygtgggtattygttaygtggttaagtattgtagtaagttgygttattttaaygygaggggttgygagggtattayggattayggtgtggagtatttygttaagaattgtattaaatttaaatttttggatatyggtaaatgttttttggtattygataygggtttggagtgtttggttttgaattgttttaattttaagyggtttagttttaagttttgygagagtattatyggttagggtttgtagatygtggtygttaattgttttgatttttagaygttgaatgtttaggattgygaggttttygtggaggttttgygttttgttaaaygttattgtaagygttgygttatygagtatattaattyggtttttttttgaagggatagagtttattyggyg

SEQ ID NO: 15575 - DNA, 1238 bp, Artificial Sequence
  Description of Artificial Sequence: Synthetic polynucleotide
gyggtttaaaggtatyggaygttggggttaagatgattttygygttgttatgaattaggttattggaygygggtttygygtygagtttgtagttttygaggagtttttygggttttttygttttgattatattttttyggatggttgtygggtttttgtttgtttygttttgtatygagttttttatgatttttttygtttttagtttgtttttttygttttttyggaagtagtygagggtyggttyggggttttttaatttgattattttggaggttttaggatyggtttygayggtttttygaggttttattgattgatttaggttgggttttagtttttgttttttggttttgatatgtagygttaggggttgtatygggtgtaattygggtttggaggtggygtygtttgaygttgtyggyggttgtaggagtygtaggtygggtttgaattgtaatagtygygtttgygyggaygaggtagyggttttttygttttgggtttgaggttgtggtagtagtaatatttgttttggttttatttgtagtagtygtygtatygygggttgtaagtyggaygttattgttttttygtaygaygaggttaaggtygtattggttgtygygtttagtgtgggagaygayggagggggttttatggttgttgtttaaaaggaggtgttttygatyggtagygggggyggagygggaygtaaygggygyggttgaggyggyggttygggtttggttttttttatgggggagggggaygtttyggttaggattgtgagtttagtygtttgttggygattttttttttttttttttyggttaagagttttgtaaggtttttgttatttagaattttaygyggtttaaaaygtagttgtttgtttgggttttatttaattataaygatygatattygtggayggttaattataggygggtttttyggttttttttggtttttattttygtttygtgttgagttttygaattatttgttatggtaggagtygtygtatttgttgtatattttygttttgatttttttgtggagtttttttatagtygttgtttttagttattttttttttattyggagttgygataatggygttgtttaggaaaygttgygtttttaggtygttgatatttagggaatgaagttttgygttataaggggagygayggttttgtgtaygygttttgtgyggtttgagtaatttgtyg

SEQ ID NO: 15576 - DNA, 220 bp, Artificial Sequence
  Description of Artificial Sequence: Synthetic polynucleotide
aygtttatygtttygtaggtagttttagttygagtggtggtygtgttgggtttgtgttyggggttttttttygtatgttttygttttttagtgtttgygatgaygtgygatttattaattattyggatttagygtatttttatgttaaatagygygtgtttatttgtaaagtataygatagtttttgyggttattgggtgtyggygtttagtttgtttyg

SEQ ID NO: 15577 - DNA, 631 bp, Artificial Sequence
  Description of Artificial Sequence: Synthetic polynucleotide
gyggtgaggggtgatttyggaggaggtagagtttygggtgttygtgggaagttttaaagtygggtygygggayggttattttgggttgtgaygtagtttaggattttygttaaggtatttgttggaggttttttttgggttttaygatttygattgygtttgtyggttgttagygaggaggyggggttaaggygagggyggggtygaggtaggaggggyggggtyggtttgatgggyggggttttygtgtgggyggggttgttggttttgyggtttgagttagyggggagaggttygggyggaggaggttgyggatttttagaggtttagtgtyggaagttgggtttggaaagggggtatygttttttyggttttggtggyggggagtgaggggaygggygaaagyggtatagggaatagtatgataygggtttgaggtagggtatatttggaaaggggygaggagagggtagtggtttttggtayggtagtagtgggtatatagaggtagtygggattygtttggaagagttttygttyggggtaaggagtygggattgtgtttaggaggtagtggggagtttyggagagygaagygttttttgygtagattygygtgtttggagtatyg

SEQ ID NO: 15578 - DNA, 904 bp, Artificial Sequence
  Description of Artificial Sequence: Synthetic polynucleotide
ayggygtttgtttttygtttttggagtgtttttggtttaaygtagtagtttygtagataaaygttatagaaggtagagygttttatagatatgaaggagtggttygtggttttaygtagaataaattattttyggtagaaagattaggaaagtttygaaatygyggagtttttaagggatgggtagaaygggygggtgagtagggttaagygttttttggatagtgattatttyggagtttggggaygygttggggggtaggagttgttttattygtttaggygagggtttgggaagggattttaagygggaggtygaygttgtttgggtttttttttggggyggtygtttttttatttatttygagtatttygaaatttggaaaggagtaaagttgaagygatggttaygtgtatgayggtaggtagtttgtagattygttgttaaattatatttaygtygggtttaataggygygtatttgtyggtaygtygttygttgttgtgatttgggtagygtygggttttaggttttygtttttygygttgtgatagtgagaagtygagaaagttatgttaygttygtttgaggaggtagttttttagtgtggtagaaagaaatgtttatttttygagtattagttaggaygtgtgtttaagttaatttgtttatttttttatttgattttttatgtaatgtaatatgtatgttttatttataaaaatgagtagygaaatttatygatttagtaatatgtttygagataygtaggagttttttttayggagttagttttyggtttttttttttaatatttatttygygttygygtagttygggtttttgttattgygttgttagttgggyggtattttttaggyggggaaaagygaattttttgtyg

SEQ ID NO: 15579 - DNA, 519 bp, Artificial Sequence
  Description of Artificial Sequence: Synthetic polynucleotide
aygttattttttgggggygyggtggggttgggtagggagygyggygygtgtttgatatttatggttggttttttttygttttttatagttgtttatggtggataayggggttgatgattggygtatygttatgatttgygagygygtgttttttatttygttagagttggtagtgtgygttatttattyggtgttyggttattatygttttaygtggayggygyggttggtttttaygtaygygttttyggtggtygaggtygaygtggaygtgttgttgtttatttttatgtttttgygtttttatttgttgggtygggtgatgttattgtatagtaaaatttttayggaygtttygagtygtagtatyggggtttttaataagattatttttaataygygtttygttatgaagatatttatgattatttgtttyggtatygtgttgttggtttttagtatttttttttggattatygtagtttggatygtgygygtttgygagaggtgygatygtyg

SEQ ID NO: 15580 - DNA, 204 bp, Artificial Sequence
  Description of Artificial Sequence: Synthetic polynucleotide
tygtygttagtttagtygttygttattttttttagtggtgtttttgttattaatgggttttttataatygattyggtttaygggttgtagatgttgyggattattggygtggggaagtatgagtttatygattyggggtattttagaggtaagttttgttgttaygtgtttttttaygggtttgygtttgtatttttttgygyg

SEQ ID NO: 15581 - DNA, 444 bp, Artificial Sequence
  Description of Artificial Sequence: Synthetic polynucleotide
tyggttttygtgtagatggaygtgaggaaygttattgtttttttttttttttttgttgtyggygttaygtaggagttggttatttttygtyggtagygtygygtttyggggaatttgatgggtttttataggtyggtgggggtggagataggggagaygaagaaggagggggtagttygtttaggaggttaggggggtattygtgttyggtttaggtttatygaygtagatattattgatatttaygttygygttgtgttttttgyggygtttgyggtygttaatgttatttattgggyggtataygttatgtgagtataggatttaggttattttygtttgttttggygttyggyggtagttgtttagaaattttttgggagaaagagttttygggttgtttttttttttgygtgtttygaagtgggatgatagtyggttayg

SEQ ID NO: 15582 - DNA, 397 bp, Artificial Sequence
  Description of Artificial Sequence: Synthetic polynucleotide
aygygttttgtttattaygaggtttgtattttttgggtagtaggtgtygygygttttygggtattttgtaggtggagtygtyggygtagygtagtatttygtgtttttgaygtyggtttyggatttagtygtygtygtatttgttatygtttttgggggatataygtayggagtttatttttaatagggggagtygggtggtggtagtgatttagatyggttttttttatygggtttygtaggtattgygggatygaggtaaaaataggttygagtagatggttttaagagtttttgtttygttagggttagttgggggtygaygataggyggtggggataygttygtttatttttattttagatggtaggtttgttygggaygtatttagttttyg

SEQ ID NO: 15583 - DNA, 1530 bp, Artificial Sequence
  Description of Artificial Sequence: Synthetic polynucleotide
aygtatggaattttygagtttggagaaygtgttggagttttgygtttaygtttttatttaygtggttaaggatttttygatygttagatattagggtttgtaatttgtgagtgyggttggagatttygtttttygttygggatttygyggagttttttttagttttttgggaggtygtttygggaggttygygttttgagttttgygtttttttattttttaggtgtatttgtttttygtttattttaaygattatattygttttatttatatggagayggataataagtgtttttatygygagttttygttgtatttggagaggtgggygygyggtygggttaatgyggggyggggtgggyggggygggattyggttttgatgtttygtygygttttaggtttgggttttataaatatatgaagatggataaggaggagggggatgaggatgaagaagaygaggtgtagygtygagttttttttttttttaattyggayggtgagtgttygtagygtttttggttygtatttatttgygtagggagtttttaattygygtttttygtagattttttggaygaygaggaygagggggagttgttygatagtttggagtttatygaggyggtttygtttaggagyggtttttagtttttygttttagtagttttygtttagttyggagttattttygtttygtygattttttttygttttygggayggggggatttttaggtattttygggttttgagttgggtygttagggtygttygttttttgtygttttttttgggtygagtttygttttygygttttgtagtggagtagtygtttttaaaggtgtaygtgattagggtgyggtygggatagygggtattttttygggttttagygtygygtgygttttggtygtttttttttggygtttttttgtattttaggtttttgtttagagtgtagttgygggygtttttaygtttatttyggttttayggtygtaggatyggyggtttttaggttatatagtygaggtttttagttygggygtaggttatttaagggggtygggagggttaggygygtaygttgggatttgyggygtttatagtggatttaaatttgtttttygaagygyggttygtgattttttttttgagtttgttttaggtgttygggtygtagttgtttggggagggygaagaggaggaggaaggggaggaygatggggtttygggygaygaggtygygtyggaggatagygaggaggtygygggttyggygttyggaygttggygtgaggaygttatygattggtagygtaygtttagygtgggygtygtggatttygagttgttgygttyggattggaaygatttgygatgtaaygtttyggggaatttgtagttgtyggaggyggaggtygtggaygtgatygtttagtatatggagyggttgaaygygygttayggygggtatgggggyggtygaaygygygttagggyggttttggaggyggggatagtyg

SEQ ID NO: 15584 - DNA, 414 bp, Artificial Sequence
  Description of Artificial Sequence: Synthetic polynucleotide
ttgttagtgtttgttgttttttatatgtggttgtagttttgtgtatggggttgtttgttattttgttgtttttgatttgggttgtgggtttgtgatatgtgtttgagttttttagttgtggttgtgatgttttgtgtggaggttttgtttgtgtgttgtttttgttttttttgttttggatggttatttattatttttgttttttattttgggggttttatgattttggagtttttatgttttggtatagagtttgtttttttgggattgggttttggttgagtagatattgtttagttgttttttgattagtgttttttgttttgtgtttggttggtattggtggtttgttgagtttagtttggtattttgttggtattggtggtttgttgggtttagtttggtgttgatatg

SEQ ID NO: 15585 - DNA, 987 bp, Artificial Sequence
  Description of Artificial Sequence: Synthetic polynucleotide
ttggagggtttttttgttgataggttttatgttttttatttgtaggataatgaagtggttgttttgtagttttttgtggtgtagttgtatgatagtaatttttatttgtggtgggagtatttttattttattgtgtggttttggtgggtagatgatattttggttagttttttttgtttgtttgagttttagttttattttggagttttgtattatagtttttatgtgtatttgtggttggtgtgatttataagtttatttgtttatagttattgtgatttttagttggtggtgagtgtttttttaaagtgggtttggttttatttagttttttggtttttggtagtagaagagggtttagtttttgtagagttgttgggggttttaggttttggttatgggtgggggtttggtggtttagggttatttagggtggtttggttggttttgggatttgttttttggtggttaagtagtggttatgaaagtttagttgttgttatatttttgaggaattggtgtatttttgtttatagtggtagttgggggtatttatgtggtttggggttgttttgatttggtagtgtatgggggttgttgtttgggttttttagtgtgttatttgtgtgttttttgtttagtgttttttggttgtgtttgtttatataggtgtggggttggggtggtgtgtttggggtttgggtgtagggggtagtgtgggatatagtttgtgatgtgtttttttttttgtagttttatttggttgtgtttaatagttttttgttaggtggtatgtggggtatttgtggggttgatttttagtgtttttagtaggtgtgggttgtggggttggtgggtattttttgtgtttttttgtttttgtgtttgtaggatttgtatagtattgtgtgttgtgttgattgtgtagttgtgtttattgttaattttaaggtgggttagtttagttttgagggtgtgggttttttg

SEQ ID NO: 15586 - DNA, 1061 bp, Artificial Sequence
  Description of Artificial Sequence: Synthetic polynucleotide
ttgttgttggtggggtttggggagttttgttgtggttgttatttattaggtaggtggtgaaggttttggtgttggtatttattagtgtggttagtttggttgaagttttgtggaagggtgggattaggtgttgtattgttgtgtttagggattggaattggtgttgtttgtaggttatgaggtttattatggagtttagtgttgtattttgtgagaggggtggatgtgggggttgtagggattttagatggtttgggattgattttaggaagagttaggggtttgggtgatttttgtgggggttttatttgtgtggtttttatgtttttatttagggtggttttattgtgttttttttattttgtgttttttttttaatagtgtttttttttttttttgttttttttttaataattgtgttttttttgtttttttttttgtgtttattatggttgtagtggttgttgttattgagttgtttttgggggttgtagagtgggtatttattttttttatgaaggtgtgtagggatttgttgtttaggttttgtttaggtttgtgtttagggattaggtatttgtagggtgggtgtggtttagtgggtttggttggggttggtggggggagtgtagtttttttggggtggttttaggttttatgtttgtttgtatttatggggaggtgattatttggttgagaatttgtggggatttggttggggtttttgtgttttttttagtttttagattttggtttggtgtaggttgagtaggtgtttaaagggaggtgttgggaggatttagttgggtttttatgtagggattttagtgttttgtaaggtttgagaggtagagtttgggaggggtgagaagagggtgggagggtagaggtttatttgatgatttgttttttagggttgaaggggtatagggagtttaggtttagttggtttattatttggaaaaggggtttggagtggaaatggttttggtgtgtttttattattaggaaagttttggaatttgtgggttttatttttgtggtagttgttttttgttttg

SEQ ID NO: 15587 - DNA, 382 bp, Artificial Sequence
  Description of Artificial Sequence: Synthetic polynucleotide
gtgtgtttattatttggtatatgggagatttatgtgtgtttattgttgggtataggggagatttatgtgtgtttattgtttggtatatgagagatttatgtgtgtttattgtttggtatagggagatttatgtgtgtttattgtttggtataggggagatttatgtgtgtttattgtttggtatagggagatttatgtgtgtttattgtttggtataggggagatttatgtgtgtttattgtttggtatagggaagatttatgtgtgtttattgtttggtatataggagatttatatggggtttgtttattatttggtatataggaggtttatgtatttttattgttaggtatatgggaaatttatgtgtgtttattgtttg

SEQ ID NO: 15588 - DNA, 261 bp, Artificial Sequence
  Description of Artificial Sequence: Synthetic polynucleotide
atggaggattttttgtttttgtggttagttggattaggtggttggtagtgagatggaataagtagattaggttgagggtgaaggtgtaggtgattagtagtatggataagaggttgttgtttgttattttttttattgtttggtttagtatttatttatttgtttgtagtaagtttagtagtattattttggttgttgttgttattttattttgttggagatattgaaggttgaggttgttattgatttttttaattgatg

SEQ ID NO: 15589 - DNA, 892 bp, Artificial Sequence
  Description of Artificial Sequence: Synthetic polynucleotide
atgtgggttttttttttgaagtttgtttaggaggtagatggagtgatttgatttggaggataggagggtgtttaggggttttggtgttatagtttttataggatgattttggagtgtttttggattttgagttgttttggttaaggagttgtattttagtttttgtttgtagtttatgggaaatgaagttgtttggtttgaagatttgtttgaagggttttgagtgtatagagtttatggtgtttggttttagatttatgagtatagtgtgggatatgtatttgttatttgtgtggggtgggagggtatgagtgaggggagggttgtgtttttaggagggtggtgggggaaggatgggggttgtattgttggttttgtggtggtgtatgttgatgtgttttagttgtaggtggttgtttttgtggtaggtgttagtggagttgatggtatgtttattagagattattttttagaattgtggagatgggaggggttagataggttggggttgagttatggaggtgttttagttgtttttttatttttatttgtatttttatttttaggttgttttgtttttggggtttatttttgttgttttgttagttatttggttttattgtttttggtagggagtttaggggttgtaatgtaggggtattgtttttgttgttgttaatattttttttggttatttggtaggtttgggttgggtttttagagttttggttgttaattttggtgttgatttggtttttgtattgtttggtttgtgtgagtataagtttttttgtggttaaggtaggattagggtggtaggagaagtgtgagaaggaggagtagatgtatagtgatttagtttggtttttgttaatgtttaaatagttttgtg

SEQ ID NO: 15590 - DNA, 682 bp, Artificial Sequence
  Description of Artificial Sequence: Synthetic polynucleotide
ttgggggtttatggtgtagtgggttgttagttgggttttgggttttttgggtagtaagggttttggtaggattttgagggttgggttaaggagggtagtttgttttggggtatttgttaggggttttatatggttgtttttaggttaggggtggtaaagatgttgttgttgtttgttttgggtttggtttttatggttgtgaaggatttttgttattttttgttgtttgtttgggttgtttggggatttttttgttgtgttagtatagagtttggaattgtggttaaggtaggaagtttttttgtgaaggtattaagtatggtagatgtttttatattgttggggtttgtttttttgtggatgggaagtgggaatgtgatgtggatgtgatgtgggaatgtaatgtgatgtgatgtgatgtgatgtggtatggtgtgaggatagtgtggtgggagtggtgttttagatttagtagggagggagatgaaaggtggatggaagaggggtttttggattttgttttttgaggtttgtgtgttgttttggttgtggtgttttgggtgatgggaaatagagttaggatatagattagggagggttggggtagagttagggtatttgtgggtgaggatggttgggtgttgggtttttggtgttagggtgtaatgttgtttgttgggtg

SEQ ID NO: 15591 - DNA, 223 bp, Artificial Sequence
  Description of Artificial Sequence: Synthetic polynucleotide
atgtgttttggtaggatttttattttatgtgatttatttttgggtttgttgtgtaggatagaagttagttttgggtggggtttttgaatatggtggtggggtttgggtgggatagaggtggggtgtgaggtggagagattttgttttttagaataggtaaagggtggggttgggattagatttgtgtatttttttgttttgtatttagtgtttttgttttttg

SEQ ID NO: 15592 - DNA, 255 bp, Artificial Sequence
  Description of Artificial Sequence: Synthetic polynucleotide
gtggatagtttgaatgtattgtagaagtatttgtttattagtgggttttattgttgggtataggtttgtgtgtttagggtagagtgtttggtgtatgttgtggagggtgtgggtaatggtgtatattgtattaattataaattgtattttgtttttttgtttgtaggtggagttttggttgatgtgttttttgtttgttttagggatgtttagagaaagtgtgtttggtttttatgtattgaatttggttttttg

SEQ ID NO: 15593 - DNA, 309 bp, Artificial Sequence
  Description of Artificial Sequence: Synthetic polynucleotide
ttgtttgtgtattttggagatatagtagatgtattgttggaaggtgtatagtattattttttttagtattgttatggtttttttgttggttgttagtgtgtaggagaatagtgatttttttgagtttgttgggagatagttatgttaatggttataatgggtatagtgtttaggaatgtagtaatttagttagttgttagttttttttttggtgtgggtattatttaatgtgtttatttggggtttagatgtgataaattggttgagggattttgggttttggttgggatgagtgtagtaaatttgttg

SEQ ID NO: 15594 - DNA, 992 bp, Artificial Sequence
  Description of Artificial Sequence: Synthetic polynucleotide
ttgttttgtgtttagtagtatagtattgtgggggttagatagaggtgtttttgttttttagttggggttagttttgggttttttttttttttagattggtataggatttagattgtttattttagtatattgatttagatagttttgtggattagtttggttattttgagtaggagttgtttgaatgtgtttggttggaagtgggtggttgagtgttggatgtagaggtataggaggaaggtgggggttagtttgtggttgttgttttttggtttgattaatgttatgattttttgtagtagtgtgttttttaggtggggtttaaattttaggagtagttgttggtgttggggtagggtggtttgagtaggggaggtggttttttgggttttgagtgtggttttgtatagttggtagttttgtggtatagtttggaggtgtgttaaggtttgggtgggtaggggttgggtttgtgtggggtttttgaatagtagtaggtagtagagttttagggagagtaggtttttgtggtgtagtattatggttttgtgttttattttggagaagttgatggagatgtgtgttttggggatgggttttaggattagtttttttgtggtttggttgttgtttgggagtggttgttggtggatggtgtagtgtagaggtaggatgttgggggttgagaggttgatgttgggtttgttggagggggtttgttggtttattgtgtgttggttttggttgagtatatatattaggttgttttgaaatagagattttgtttagggtaggtgtaatgtgagtagtatatgggaaaagtgttttgtgtttagttattggttgttgaagtagtgtggttgggatgttgttgttatgggttttttatgtttttggttatttttatattagaattttgatggtttttaggaatttgttttttgatgtttgggtttattttagaggaggttggttttttggaggagtatatg

SEQ ID NO: 15595 - DNA, 265 bp, Artificial Sequence
  Description of Artificial Sequence: Synthetic polynucleotide
ttgtgttttgtgtttttggttttttttttttttagtgttttttttatttggtgttgtttggttgtaattttggtttttttggggaagaggtttggattttattttttatttgatatgaagaggtttggatttttagttttatttggtatgtttatgggtagtagttttattttgtttggtgtgtttatgggtagtagttttgttttatttggtgtgtttatggttagtagttttgttgtgtttggtgtgtttatgggtagttttg

SEQ ID NO: 15596 - DNA, 488 bp, Artificial Sequence
  Description of Artificial Sequence: Synthetic polynucleotide
ttggtggaggtgggtgtggtgggggaggggtttttttttttgtttttttatttttttggtaggtgttttagggtgggggtgttgttgtgtgttttggtgtgttttggttttgttattagttttattggggttttataattgtttagttgtttagtgtgtgtttggagaaagagaagtgggtgattatggagtagtgtttttattattgattgtttttttgttattgtatttatataatttgttttaaatgggtaatttattaagtatattttgtttttgtttttgttgtaggtttttgttggattgttgtttataagtttttatagtttgtgagtttttttagtttggtttggtttattttgtggtgtttatgtttattttgggttttttttgatttttttttaatttttagtagagttgtgggttttttttagttagtttttatagtgtgtttaggagattgtgtttttttttgttagatatgggtg

SEQ ID NO: 15597 - DNA, 676 bp, Artificial Sequence
  Description of Artificial Sequence: Synthetic polynucleotide
ttgttatttggatatgatggattgttttgtgttggaggatgaaggtttgtatattattgtggtgtattgtatgtagtttatttatttttatttgtgttgttgtgtttgtttgattgatgaaggtttgtgttatttggtgatttattgtgtttttattaaggagttgagtgttagtgattgttgttttgttagtgattttggtttgtgggagattgttaagttggagttttgtttgtggtatttgagtattgtgtattgtggttgggttattgatgtgggtatttgttatgtggttaagtattgtagtaagttgtgttattttaatgtgaggggttgtgagggtattatggattatggtgtggagtattttgttaagaattgtattaaatttaaatttttggatattggtaaatgttttttggtatttgatatgggtttggagtgtttggttttgaattgttttaattttaagtggtttagttttaagttttgtgagagtattattggttagggtttgtagattgtggttgttaattgttttgatttttagatgttgaatgtttaggattgtgaggtttttgtggaggttttgtgttttgttaaatgttattgtaagtgttgtgttattgagtatattaatttggtttttttttgaagggatagagtttatttggtg

SEQ ID NO: 15598 - DNA, 1238 bp, Artificial Sequence
  Description of Artificial Sequence: Synthetic polynucleotide
gtggtttaaaggtattggatgttggggttaagatgatttttgtgttgttatgaattaggttattggatgtgggttttgtgttgagtttgtagtttttgaggagttttttgggtttttttgttttgattatatttttttggatggttgttgggtttttgtttgttttgttttgtattgagttttttatgattttttttgtttttagtttgttttttttgtttttttggaagtagttgagggttggtttggggttttttaatttgattattttggaggttttaggattggttttgatggttttttgaggttttattgattgatttaggttgggttttagtttttgttttttggttttgatatgtagtgttaggggttgtattgggtgtaatttgggtttggaggtggtgttgtttgatgttgttggtggttgtaggagttgtaggttgggtttgaattgtaatagttgtgtttgtgtggatgaggtagtggtttttttgttttgggtttgaggttgtggtagtagtaatatttgttttggttttatttgtagtagttgttgtattgtgggttgtaagttggatgttattgtttttttgtatgatgaggttaaggttgtattggttgttgtgtttagtgtgggagatgatggagggggttttatggttgttgtttaaaaggaggtgtttttgattggtagtgggggtggagtgggatgtaatgggtgtggttgaggtggtggtttgggtttggttttttttatgggggagggggatgttttggttaggattgtgagtttagttgtttgttggtgatttttttttttttttttttggttaagagttttgtaaggtttttgttatttagaattttatgtggtttaaaatgtagttgtttgtttgggttttatttaattataatgattgatatttgtggatggttaattataggtgggttttttggttttttttggtttttatttttgttttgtgttgagtttttgaattatttgttatggtaggagttgttgtatttgttgtatatttttgttttgatttttttgtggagtttttttatagttgttgtttttagttattttttttttatttggagttgtgataatggtgttgtttaggaaatgttgtgtttttaggttgttgatatttagggaatgaagttttgtgttataaggggagtgatggttttgtgtatgtgttttgtgtggtttgagtaatttgttg

SEQ ID NO: 15599 - DNA, 220 bp, Artificial Sequence
  Description of Artificial Sequence: Synthetic polynucleotide
atgtttattgttttgtaggtagttttagtttgagtggtggttgtgttgggtttgtgtttggggtttttttttgtatgtttttgttttttagtgtttgtgatgatgtgtgatttattaattatttggatttagtgtatttttatgttaaatagtgtgtgtttatttgtaaagtatatgatagtttttgtggttattgggtgttggtgtttagtttgttttg

SEQ ID NO: 15600 - DNA, 631 bp, Artificial Sequence
  Description of Artificial Sequence: Synthetic polynucleotide
gtggtgaggggtgattttggaggaggtagagttttgggtgtttgtgggaagttttaaagttgggttgtgggatggttattttgggttgtgatgtagtttaggatttttgttaaggtatttgttggaggttttttttgggttttatgattttgattgtgtttgttggttgttagtgaggaggtggggttaaggtgagggtggggttgaggtaggaggggtggggttggtttgatgggtggggtttttgtgtgggtggggttgttggttttgtggtttgagttagtggggagaggtttgggtggaggaggttgtggatttttagaggtttagtgttggaagttgggtttggaaagggggtattgtttttttggttttggtggtggggagtgaggggatgggtgaaagtggtatagggaatagtatgatatgggtttgaggtagggtatatttggaaaggggtgaggagagggtagtggtttttggtatggtagtagtgggtatatagaggtagttgggatttgtttggaagagtttttgtttggggtaaggagttgggattgtgtttaggaggtagtggggagttttggagagtgaagtgttttttgtgtagatttgtgtgtttggagtattg

SEQ ID NO: 15601 - DNA, 904 bp, Artificial Sequence
  Description of Artificial Sequence: Synthetic polynucleotide
atggtgtttgttttttgtttttggagtgtttttggtttaatgtagtagttttgtagataaatgttatagaaggtagagtgttttatagatatgaaggagtggtttgtggttttatgtagaataaattatttttggtagaaagattaggaaagttttgaaattgtggagtttttaagggatgggtagaatgggtgggtgagtagggttaagtgttttttggatagtgattattttggagtttggggatgtgttggggggtaggagttgttttatttgtttaggtgagggtttgggaagggattttaagtgggaggttgatgttgtttgggtttttttttggggtggttgtttttttatttattttgagtattttgaaatttggaaaggagtaaagttgaagtgatggttatgtgtatgatggtaggtagtttgtagatttgttgttaaattatatttatgttgggtttaataggtgtgtatttgttggtatgttgtttgttgttgtgatttgggtagtgttgggttttaggtttttgttttttgtgttgtgatagtgagaagttgagaaagttatgttatgtttgtttgaggaggtagttttttagtgtggtagaaagaaatgtttattttttgagtattagttaggatgtgtgtttaagttaatttgtttatttttttatttgattttttatgtaatgtaatatgtatgttttatttataaaaatgagtagtgaaatttattgatttagtaatatgttttgagatatgtaggagttttttttatggagttagtttttggtttttttttttaatatttattttgtgtttgtgtagtttgggtttttgttattgtgttgttagttgggtggtattttttaggtggggaaaagtgaattttttgttg

SEQ ID NO: 15602 - DNA, 519 bp, Artificial Sequence
  Description of Artificial Sequence: Synthetic polynucleotide
atgttattttttgggggtgtggtggggttgggtagggagtgtggtgtgtgtttgatatttatggttggtttttttttgttttttatagttgtttatggtggataatggggttgatgattggtgtattgttatgatttgtgagtgtgtgttttttattttgttagagttggtagtgtgtgttatttatttggtgtttggttattattgttttatgtggatggtgtggttggtttttatgtatgtgtttttggtggttgaggttgatgtggatgtgttgttgtttatttttatgtttttgtgtttttatttgttgggttgggtgatgttattgtatagtaaaatttttatggatgttttgagttgtagtattggggtttttaataagattatttttaatatgtgttttgttatgaagatatttatgattatttgttttggtattgtgttgttggtttttagtatttttttttggattattgtagtttggattgtgtgtgtttgtgagaggtgtgattgttg

SEQ ID NO: 15603 - DNA, 204 bp, Artificial Sequence
  Description of Artificial Sequence: Synthetic polynucleotide
ttgttgttagtttagttgtttgttattttttttagtggtgtttttgttattaatgggttttttataattgatttggtttatgggttgtagatgttgtggattattggtgtggggaagtatgagtttattgatttggggtattttagaggtaagttttgttgttatgtgtttttttatgggtttgtgtttgtatttttttgtgtg

SEQ ID NO: 15604 - DNA, 444 bp, Artificial Sequence
  Description of Artificial Sequence: Synthetic polynucleotide
ttggtttttgtgtagatggatgtgaggaatgttattgtttttttttttttttttgttgttggtgttatgtaggagttggttattttttgttggtagtgttgtgttttggggaatttgatgggtttttataggttggtgggggtggagataggggagatgaagaaggagggggtagtttgtttaggaggttaggggggtatttgtgtttggtttaggtttattgatgtagatattattgatatttatgtttgtgttgtgttttttgtggtgtttgtggttgttaatgttatttattgggtggtatatgttatgtgagtataggatttaggttatttttgtttgttttggtgtttggtggtagttgtttagaaattttttgggagaaagagtttttgggttgtttttttttttgtgtgttttgaagtgggatgatagttggttatg

SEQ ID NO: 15605 - DNA, 397 bp, Artificial Sequence
  Description of Artificial Sequence: Synthetic polynucleotide
atgtgttttgtttattatgaggtttgtattttttgggtagtaggtgttgtgtgtttttgggtattttgtaggtggagttgttggtgtagtgtagtattttgtgtttttgatgttggttttggatttagttgttgttgtatttgttattgtttttgggggatatatgtatggagtttatttttaatagggggagttgggtggtggtagtgatttagattggttttttttattgggttttgtaggtattgtgggattgaggtaaaaataggtttgagtagatggttttaagagtttttgttttgttagggttagttgggggttgatgataggtggtggggatatgtttgtttatttttattttagatggtaggtttgtttgggatgtatttagtttttg

SEQ ID NO: 15606 - DNA, 1530 bp, Artificial Sequence
  Description of Artificial Sequence: Synthetic polynucleotide
atgtatggaatttttgagtttggagaatgtgttggagttttgtgtttatgtttttatttatgtggttaaggattttttgattgttagatattagggtttgtaatttgtgagtgtggttggagattttgttttttgtttgggattttgtggagttttttttagttttttgggaggttgttttgggaggtttgtgttttgagttttgtgtttttttattttttaggtgtatttgttttttgtttattttaatgattatatttgttttatttatatggagatggataataagtgtttttattgtgagtttttgttgtatttggagaggtgggtgtgtggttgggttaatgtggggtggggtgggtggggtgggatttggttttgatgttttgttgtgttttaggtttgggttttataaatatatgaagatggataaggaggagggggatgaggatgaagaagatgaggtgtagtgttgagttttttttttttttaatttggatggtgagtgtttgtagtgtttttggtttgtatttatttgtgtagggagtttttaatttgtgttttttgtagattttttggatgatgaggatgagggggagttgtttgatagtttggagtttattgaggtggttttgtttaggagtggtttttagttttttgttttagtagtttttgtttagtttggagttatttttgttttgttgatttttttttgtttttgggatggggggatttttaggtatttttgggttttgagttgggttgttagggttgtttgttttttgttgttttttttgggttgagttttgtttttgtgttttgtagtggagtagttgtttttaaaggtgtatgtgattagggtgtggttgggatagtgggtatttttttgggttttagtgttgtgtgtgttttggttgtttttttttggtgtttttttgtattttaggtttttgtttagagtgtagttgtgggtgtttttatgtttattttggttttatggttgtaggattggtggtttttaggttatatagttgaggtttttagtttgggtgtaggttatttaagggggttgggagggttaggtgtgtatgttgggatttgtggtgtttatagtggatttaaatttgttttttgaagtgtggtttgtgattttttttttgagtttgttttaggtgtttgggttgtagttgtttggggagggtgaagaggaggaggaaggggaggatgatggggttttgggtgatgaggttgtgttggaggatagtgaggaggttgtgggtttggtgtttggatgttggtgtgaggatgttattgattggtagtgtatgtttagtgtgggtgttgtggattttgagttgttgtgtttggattggaatgatttgtgatgtaatgttttggggaatttgtagttgttggaggtggaggttgtggatgtgattgtttagtatatggagtggttgaatgtgtgttatggtgggtatgggggtggttgaatgtgtgttagggtggttttggaggtggggatagttg

SEQ ID NO: 15607 - DNA, 414 bp, Artificial Sequence
  Description of Artificial Sequence: Synthetic polynucleotide
ygtgttagygttaggttggatttagygagtygtygatgttagygagatgttaggttggatttagtaagtygtygatgttagttagaygtagagtagagaaygttggttaaagagtagttaggyggtgtttgttyggtygaagtttagtttyggagaggtaggttttgtattaggaygtggaggtttyggggttatgaaatttttagggtgagagataaaggtagtgagtggtygtttagggtagaggggayggaggtagtaygyggayggagttttygtatagagygttayggttaygattggaaagtttagataygtgttaygagtttatagtttaggttagaggyggtaggatggygggyggttttatgtatagaattgyggttaygtgtggaaggygayggatattggygg

SEQ ID NO: 15608 - DNA, 987 bp, Artificial Sequence
  Description of Artificial Sequence: Synthetic polynucleotide
ygaggagttygygtttttaggattggattgatttattttgaggttgaygatgggtayggttgygyggtyggtayggygtaygatgttgtataggttttgtaggygygaggataggaaggygyggaaggtgttygttagttttayggttygygtttgttggaagtattggaagtyggtttygyggatgtttygtatgtygtttgatagggggttgttgagygtaattaggtggagttgyggggagaggggygygttaygggttgtgttttaygttgttttttgtatttaggtttygggygtattatttyggtttygtatttgtgtggataggtayggtygaggggygttgagygggaggygygtaagtgatatattgaggggtttaggtagtagtttttataygttgttaggttagagtagtttygggttaygtgggtgtttttagttgtygttgtaggyggaggtaygtyggttttttaaggatgtgatagyggttggatttttatgattattgtttggttattagagggtaagttttagggttagttaagtygttttgagtggttttgagtygttagatttttatttatggtygaagtttgggatttttagtagttttgtaggggttgggtttttttttgttgtygagagtygaggggttagatggagttaagtttattttgggggggtatttattatyggttggaagtygyggtggttgtgggygggtgggtttgtgggtygygtyggtygtaggtgtaygtaggagttgtggtgyggggtttyggggtagggttggggttygggtaggygaggggggttggttaggatgttatttgttygttagggtygygyggtggggtgggggtgttttygtygygggtaggggttgttgtygtgtagttgtattayggggggttgtaaggyggttattttattgttttgtaggtgggagaygtggggtttgtyggyggggggatttttygg

SEQ ID NO: 15609 - DNA, 1061 bp, Artificial Sequence
  Description of Artificial Sequence: Synthetic polynucleotide
yggggtagggggyggttgtygtaagggtgggattygygggtttygaggtttttttggtggtggagaygygtygaggtygtttttattttaagttttttttttaggtggtgagtyggttgggtttggattttttgtgtttttttagttttaaggagyggattatygagtgagtttttgttttttygttttttttttatttttttygggttttgtttttygggttttgyggggygttggggtttttgygtggagattyggttgagtttttttagygtttttttttgggygtttattyggtttgygttaagtyggggtttgggggttgaggggggtatagagatttyggtygggttttygtaggtttttagtygagtggttattttttygtgggtgtagaygggygtggggtttggggtygtttygggaggattgygttttttttattaatttyggttagattygttgagtygygtttattttgtaggtatttggtttttgagygygggtttgagygaggtttgggtagtaagtttttgygygttttygtgggggaggtgggtgttygttttgyggttttygggggyggttyggtggyggyggtygttgyggttatggtgagygyggggggaggggtaggggaggygtagttgttggggggagggyggggagggggaagggygttgttggggggagggtayggggtggggagggygyggtggggtygttttgggtggagaygtgggggttataygggtgggattttygtagggattattygggtttttggttttttttggggtyggtttygggtygtttggggtttttgygatttttatatttatttttttygtagggtgyggygttgggttttatggtgggttttatgatttaygggyggygttaattttagtttttggataygaygatgyggygtttgatttygttttttygygaggtttyggttaagttaattaygttggtggatgtygaygtygaggtttttatygtttatttggtgagtggyggttatagtagggtttttygggttttattaatagyga

SEQ ID NO: 15610 - DNA, 382 bp, Artificial Sequence
  Description of Artificial Sequence: Synthetic polynucleotide
yggayggtaaataygygtgggtttttygtgtgtttgayggtaaagatgtatgggttttttgtgtgtyggatggtaaataggtttygtgtgggttttttgtgtgtyggatagtaaatataygtgggttttttttgtgtyggatagtaaatataygtgggttttttttgtgtyggatagtaaataygygtgggtttttttgtgtyggatagtaaataygygtgggttttttttgtgtyggatagtaaataygygtgggtttttttgtgttaaayggtaaataygygtgggtttttygtgtgtygaatagtaaataygygtgggttttttttgtgttygatagtaaataygygtgggtttttygtgtgtyggatgataaataygt

SEQ ID NO: 15611 - DNA, 261 bp, Artificial Sequence
  Description of Artificial Sequence: Synthetic polynucleotide
ygtygattaggaggatyggtggygatttyggtttttagtgttttygatagagtgaaatggyggyggyggtygggatgatgttgttgggtttgttataggygggtgggtaggtgttgggttaggygatggaggaggtggtaggyggtaattttttgtttatgttgttgatygtttgygtttttatttttagtttggtttatttgtttygtttygttgtyggttatttggtttagttgatygtaggggygaaaagtttttygt

SEQ ID NO: 15612 - DNA, 892 bp, Artificial Sequence
  Description of Artificial Sequence: Synthetic polynucleotide
ygyggggttgtttaagygttggyggaggtygggttgggtygttgtgygtttgtttttttttttygygttttttttgtygttttaattttgttttggttaygagggagtttgtgtttaygtagatygggtagtgygggaattagatyggygttaaggttggtagtyggggttttgagggtttagttygggtttgtygggtggtyggggaagatgttggtagyggygggggyggtgtttttgtattgyggtttttgggttttttgtyggggayggtggaatygggtggttggygaggyggygggggtggattttagggatagggyggtttggggatgggggtgyggatgggggtgggagagyggttggggygttttygtgatttagtttyggtttgtttggtttttttygttttygtagttttgggaggtgatttttgatgaatatgttatygatttygttggtatttattayggggatagttatttgtagttggagygtattaaygtgtattattaygaggttagyggtgygattttygttttttttttatygtttttttgggaaygyggtttttttttygtttatgttttttygttttaygtaggtggtaggtaygtgtttygygttgtgttygtggatttggagtygggtattatggattttgtgygttyggggtttttygggtaggtttttaggttagataattttatttttygtgagttgygggygaggattggggtgyggttttttagttagggtagttygaaatttaggaaygttttaaggttattttgtgggaattgtggygttagggtttttgaatatttttttgtttttygagtygagtygttttatttgttttttaaaygggtttygggaggaaggttygygt

SEQ ID NO: 15613 - DNA, 682 bp, Artificial Sequence
  Description of Artificial Sequence: Synthetic polynucleotide
ygtttagtaggyggtattgygttttgaygtyggggatttagtatttagtygttttygttygtaggtgttttggttttgtttyggttttttttggtttgtgttttgattttgtttttygtygtttagaaygtygtagttagggyggtatataagtttygaggggyggggttygggggttttttttttattygtttttygtttttttttttgttggatttgaggygtygttttygtygygttgttttygygttatgttaygttaygttaygttaygttaygttaygtttttaygttaygtttaygttaygtttttatttttygtttatagggaaaygggtttyggygatgtgagggygtttgtygtgtttggtgtttttataggggagttttttgttttggtygyggttttaggttttgtgttgaygtagtaggagggttttygggtagtttaggtaggygayggggagtgaygagggttttttatagttatgggagtygagtttagagtaggyggtagtagygtttttgttatttttggtttaaaagtagtygtgtggggtttttgataggtgtttyggagygaattgttttttttggtttagtttttagggttttgttagggtttttgttgtttagaaggttyggggttyggttgaygattygttatatygtgggttttygg

SEQ ID NO: 15614 - DNA, 223 bp, Artificial Sequence
  Description of Artificial Sequence: Synthetic polynucleotide
ygaaaaatagaggygttgggtgygaggyggagagatgtataggtttggtttyggtttygttttttgtttgttttaaagggtaaggttttttygtttygygtttygtttttgttttatttaggtttygttattatgttygggggttttattygggattggtttttgttttgygtagtaaattyggaagtggattaygtggagtaaaggttttatygaggygygt

SEQ ID NO: 15615 - DNA, 255 bp, Artificial Sequence
  Description of Artificial Sequence: Synthetic polynucleotide
ygggaggtygggttyggtgtatgggggtygggtatattttttttgggtatttttaggataggygaggaaygtatyggtygggattttatttaygagtaggagggtaaggtgtagtttgtgattgatgyggtgtaygttattgtttaygttttttatagtatgtattaggygttttgttttgggtatataggtttgtgttyggygatggaatttattgatgggyggatgtttttgtagtatattygagttgttygt

SEQ ID NO: 15616 - DNA, 309 bp, Artificial Sequence
  Description of Artificial Sequence: Synthetic polynucleotide
yggtaggtttgttgygttygttttagttagggtttagagtttttyggttagtttatygtatttggattttagatgggygygttgggtggtgttygygttagggaaagagttggyggttggttgagttgttgygtttttgagygttgtgttygttgtgattattggygtggttgtttttyggtaggttygaaggaatygttgtttttttgtaygttgayggttagygaggaggttatggyggtgttggaggaggtggtgttgtaygttttttagtagtgygtttattatgtttttaaggtgtayggaygg

SEQ ID NO: 15617 - DNA, 992 bp, Artificial Sequence
  Description of Artificial Sequence: Synthetic polynucleotide
ygtgtgttttttygggaaatygattttttttgggatgggttyggatatygaggggygggtttttgagagtygtyggggttttggtgtgggggtggttagggatatggagagttygtggygatagtattttagttaygttgttttagtaattagtgattagataygggaygtttttttygtgtgttgttygygttaygtttgttttgagyggagtttttgttttaggatagtttggtgtatgtgtttaatygggatyggtatayggtgggttagyggattttttttagtaagtttagtattagttttttagttttygatattttgtttttatattgtattattygtyggtaatygttttyggatagyggttaggtygyggggaggttggttttggagtttattttyggggygtatattttygttaattttttygaggtggggtataggatygtggtgttgtattayggggatttgttttttttggggttttattatttgttgttatttaaggatttygygtaggtttagtttttgttygttygggttttggygygttttygggttgtgtygtagagttgtyggttgtgyggggtygygttyggggttyggggagtygttttttttatttaggtygttttgtttyggygttagtagttgtttttggagtttgagttttatttggaggataygttgttgtagaggattatgaygttgatygagtyggggggygaygattataagttgattttygttttttttttgtgtttttgtatttagtattyggttatttatttttagtygggtatattygggtagtttttgtttaagatagttaggttgattygygagattgtttgggttagtgtgttggggtgggyggtttgggttttgtgtyggtttgggggaagagggggttyggagttggtttyggttgggaggygggagygtttttatttgatttttayggtgttgtgttgttgagygtagggygg

SEQ ID NO: 15618 - DNA, 265 bp, Artificial Sequence
  Description of Artificial Sequence: Synthetic polynucleotide
yggggttgttygtgaataygttaagtataayggggttgttgatygtgaataygtygaataaaatagggttgttgttygtgaataygttaaataaaatggggttgttgttygtgaatatgtygaataaaattgggagttygaatttttttatgttaaataaagagtagggttygaattttttttttaggagggttagggttgyggtygggygaygttaggtggggaagatattagaagaggagaaaattaggagygtaggaygygg

SEQ ID NO: 15619 - DNA, 488 bp, Artificial Sequence
  Description of Artificial Sequence: Synthetic polynucleotide
ygttygtgtttggygggagaggatayggttttttaggygygttgtagaagttgattggagaaggttygygattttgttgagggttaaagaggaatyggaaagggttyggggtagaygtgggygttatagggtgagtygggttaggttgagaggatttaygggttatgggagtttgtgggygayggttyggtaggggtttgyggygggaatagggataaaatatatttaataaattgtttatttagagtaagttgtgtgggtataatggygagaaaayggttagtaatggagaygttgtttygtagtygtttatttttttttttttaggygygtattggayggttgagygattgtgaggttttagtggggttggtgatagaattaaggygygtygaagygygyggtagtattttygttttagggygtttattagaggggtaaaagggtaaaagagagagttttttttttattaygttygttttygtygg

SEQ ID NO: 15620 - DNA, 676 bp, Artificial Sequence
  Description of Artificial Sequence: Synthetic polynucleotide
ygtyggatgaattttgtttttttagaagaaagtygggttggtgtgttygatgaygtagygtttgtagtggygtttgataaagygtagggtttttayggagatttygtagttttggatatttagygtttggaggttaaagtagttggyggttaygatttgtaagttttggtyggtgatgttttygtaggatttgaggttgagtygtttgaggttgaagtagtttagggttaggtattttaggttygtgtyggatattaaagggtatttgtygatatttagggatttgagtttggtgtagtttttggygaggtattttatatygtggttygtgatgttttygtagtttttygygttgaggtagygtagtttgttgtagtatttggttaygtagyggatgtttaygtyggtgattyggtygtagtgygygatgtttaggtatygtaggygggattttagtttggygatttttygtaggtygaagtygttgaygaagyggtagtygttgaygtttagttttttgatggaggygtagtagattattaggtagygtaggttttygtyggttaggyggaygtagyggygtaggtagaggtgggtgagttgygtgtagtgygtygygatggtgtgtaggttttygttttttagtaygaagtagttygttatgtttaggtagygg

SEQ ID NO: 15621 - DNA, 1238 bp, Artificial Sequence
  Description of Artificial Sequence: Synthetic polynucleotide
ygatagattatttaggtygtatagagygygtgtataaggtygtygttttttttgtgaygtaagattttattttttggatgttagyggtttggaagygtaaygttttttgggtaaygttattgtygtagtttygggtgggggagggatgattaaagataayggttgtaagagaattttataagagagttagaaygaaaatgtgtaataagtgyggyggtttttattatggtaggtgattygaggatttagtaygaggygagagtagggattaggaagagtyggaaaattygtttgtgattggtygtttaygggtatyggtygttgtgattgggtgaggtttagatagatagttgygttttgaatygygtagggttttgggtagtaaaggttttgtaaggtttttaatygaaagggggagggggaaggtygttaataaayggttgagtttataattttggtyggggygttttttttttttatggagagagttagattygagtygtygttttagtygygttygttgygtttygtttygttttygttgtyggtygagggtatttttttttgggtagtagttatggagtttttttygtygttttttatattgagygyggtagttagtgygattttggtttygtygtgyggggaggtagtggygttyggtttatagttygyggtgyggyggttgttgtaggtgaagttagagtaggtgttgttgttattatagttttaggtttagaaygaggaagtygttgtttygttygygtaggygyggttgttgtagtttaggttygatttgyggtttttgtagtygtygatagygttagayggygttatttttaggttygagttgtattyggtgtagtttttggygttgtatgttaaggttaagaagtagaagttggggtttagtttggattagttagtggggtttygaggggtygtygaaatyggttttagagtttttagggtggttaagttggaaggtttygggtyggttttyggttattttygaggggaygagaagggtaagttggaggyggaggaggttatgagagattygatgtaaggyggggtaggtaaaagttyggtagttattygagaaggtgtgattaaaayggaggaattygagagatttttygaggattgtaggttyggygyggagttygygtttaatggtttggtttatggtagygyggaggttattttggttttaaygttyggtgtttttgggtygt

SEQ ID NO: 15622 - DNA, 220 bp, Artificial Sequence
  Description of Artificial Sequence: Synthetic polynucleotide
ygggataggttgggygtyggtatttagtggtygtaggggttgtygtgtgttttgtagatggataygygttatttaatatagagatgygttgagttygggtgattagtgaatygtaygttatygtagatattagaaagygaaagtataygggggaaggtttygggtatagatttagtayggttattattygagttggagttgtttgygagaygatgagygt

SEQ ID NO: 15623 - DNA, 631 bp, Artificial Sequence
  Description of Artificial Sequence: Synthetic polynucleotide
yggtattttaagtaygygagtttgygtaggaggygtttygtttttyggagttttttattgttttttagatatagtttyggttttttatttygggyggaggtttttttagaygggtttygattgtttttgtatgtttattgttgtygtgttagaagttattgtttttttttygtttttttttaaatgtgttttgttttaggttygtgttatgttgttttttgtgtygttttygttygtttttttatttttygttattagaatygggaaggyggtgttttttttttaggtttaattttyggtattgaatttttaggagttygtagtttttttygttygggttttttttygttggtttagatygtagggttagtagtttygtttatayggaagtttygtttattaggtygatttygttttttttgtttyggtttygttttygttttggtttygttttttygttggtagtyggtaggygtagtyggggtygtgggatttaggaggggtttttagtaggtgttttggygaagattttggattgygttatagtttagggtagtygtttygyggttyggttttggagttttttayggatattyggggttttgtttttttygaaattattttttatygt

SEQ ID NO: 15624 - DNA, 904 bp, Artificial Sequence
  Description of Artificial Sequence: Synthetic polynucleotide
yggtagaagattygttttttttygtttgaaaggtgtygtttagttggtagygtaatggtaggagttygggttaygygagygyggggtggatgttggaggggaaggtygggagttggtttygtggaaaaggtttttgygtgtttyggaatatgttgttgggtyggtggatttygttgtttatttttgtggatgaaatatgtatgttatattatataagggattaggtggaagaatgaataggttggtttaagtataygttttggttggtgttyggagagtgggtatttttttttgttatattgaggagttgtttttttagayggaygtgatatgattttttyggttttttattgttatagygygagaggygggggtttgagattygaygttgtttaggttatagtagygggyggygtgtyggtaggtgygygtttgttagattyggygtgagtgtagtttaataaygaatttgtaggttgtttgtygttatgtaygtggttatygttttagttttgtttttttttaggtttygggatgttyggggtgaatggggaggyggtygttttaagggaggatttaggtagygtyggtttttygtttggggtttttttttagattttygtttgaaygagtgggatagtttttgttttttagygygtttttaggtttygggatggttattgtttaggaggygtttggttttgtttattygttygttttgtttattttttgagaatttygygatttygaaatttttttgatttttttgtyggaagtaatttgttttaygtgaaattaygggttatttttttatatttgtagagygttttattttttgtaaygtttatttgygaaattgttgygttaggttaggagtattttaagagygagaggtagaygtygt

SEQ ID NO: 15625 - DNA, 519 bp, Artificial Sequence
  Description of Artificial Sequence: Synthetic polynucleotide
yggyggtygtatttttygtagaygygtayggtttaggttgygatgatttaggaggagatgttgaagattagtagtayggtgtyggggtagatggttatgagtgtttttatgaygaagygygtgttgaaggtgattttgttgagggtttygatgttgyggttygaggygttygtgaagattttgttgtgtagtagtattattyggtttagtaggtagaggygtaggaatatggggatggatagtagtaygtttaygtyggtttyggttatygagggygygtaygtgaaggttagtygygtygtttaygtgaagyggtagtggtygggtatygggtgaatggygtatattgttagttttagygagatgaggaataygygttygtaggttatggygatgygttagttattagtttygttgtttattatgaatagttgtggagggygggagggaattagttatgggtgttagataygygtygygttttttgtttagttttatygygtttttagagagtgaygt

SEQ ID NO: 15626 - DNA, 204 bp, Artificial Sequence
  Description of Artificial Sequence: Synthetic polynucleotide
ygygtagggaggtgtagaygtaggttygtggggaggtaygtggtagtaggatttatttttggggtgtttygggtyggtgaatttatatttttttaygttaatggttygtagtatttgtagttygtgggtygagtyggttgtggggggtttattggtggtaggggtattattggggagagtggyggayggttgggttggyggygg

SEQ ID NO: 15627 - DNA, 444 bp, Artificial Sequence
  Description of Artificial Sequence: Synthetic polynucleotide
ygtggtygattgttattttatttygaaataygtagaggggaaggtagttygagggtttttttttttaggaagtttttgggtagttgtygtygggygttaggataagygagggtggtttgagttttgtgtttatatggygtatgtygtttagtagatgatattgayggtygtaaaygtygtagggaatatagygygggygtaaatgttaatggtgtttgygtygatgggtttgagtygggtayggatgtttttttggttttttgagygggttgtttttttttttttygttttttttgtttttatttttatygatttgtaggagtttattaggtttttygggaygyggygttgtyggygggagatggttagtttttgygtgaygtyggtagtagagagggagaagaggataatggygttttttaygtttatttgtaygaaggtygg

SEQ ID NO: 15628 - DNA, 397 bp, Artificial Sequence
  Description of Artificial Sequence: Synthetic polynucleotide
yggaagttgagtgygtttygagtaggtttattatttagggtgggggtgggyggaygtgtttttatygtttgtygtyggtttttagttggttttggygaggtaggagtttttggggttatttgttygggtttatttttgtttyggtttygtagtgtttgyggagttyggtgggaggagtyggtttgagttattgttattattyggttttttttgttgagagtggatttygtgygtgtgttttttaggaayggtgataagtaygayggygattgggttygggatyggygttagggatayggggtgttgygttgygtygayggttttatttataaggtattygggggygygyggtatttgttgtttagagggtataggtttygtggtgggtagggygygt

SEQ ID NO: 15629 - DNA, 1530 bp, Artificial Sequence
  Description of Artificial Sequence: Synthetic polynucleotide
yggttgttttygtttttaaaatygttttggygygygttyggtygtttttatattygtygtggygygygtttagtygttttatgtattgagyggttaygtttayggttttygttttyggtagttgtaggtttttygaaaygttgtatygtaggtygttttagttygagygtagtagttygaagtttayggygtttaygttgaaygtgygttgttagtygatggygtttttaygttagygttygagygtygggttygyggttttttygttgtttttygaygyggtttygtygttyggggttttatygttttttttttttttttttttttygttttttttgggtagttgyggttyggatatttgggataagtttaggaaggaggttaygggtygygtttyggaggataagtttgagtttattgtgggygtygtaggttttagygtgygygtttggttttttyggtttttttgggtggtttgygttygggttgggggtttyggttgtgtggtttgggggtygtyggttttgyggtygtggggtyggggtgggygtgggggygttygtagttgtattttgggtagaggtttggggtgtaggaagaygttagggaagggyggttagggygtaygyggygttggggttyggggggatgttygttgtttyggtygtattttggttaygtatatttttgggggyggttgttttattgtagggygygggggyggagttyggtttaagaagagyggtaaagggygggyggttttggyggtttagtttagggttygggagtgtttgggggttttttygtttygggggyggggaggggtyggyggggygagggtggtttygggttgggygggggttgttggggygggggattgggggtygtttttgggyggggtygtttyggtgggttttaggttgtygagtagttttttttygttttygtygtttaggaagtttgygggaaaygygggttagaagttttttgygtaggtgggtgygggttaggggygttgyggatatttatygttygggttgaggaagaggaaggttyggygttgtatttygttttttttatttttattttttttttttttgtttatttttatgtatttatagaatttaaatttggggygyggyggggtattagagtygagtttygtttygtttatttygtttygtattagttyggtygygygtttatttttttagatatagyggagattygyggtagaagtatttgttgttygtttttatgtgggtgaggygagtgtagtygttgggataaaygaaggataggtatatttggggggtgggggggygtagggtttagggygyggatttttyggggyggttttttaaggggttggagaaggtttygyggagtttyggaygggagayggggtttttagtygtatttataaattgtaggttttggtatttggygatygggaagtttttgattaygtaggtgggggygtaggygtagggttttagtaygttttttaggttygaagattttatgygt

SEQ ID NO: 15630 - DNA, 414 bp, Artificial Sequence
  Description of Artificial Sequence: Synthetic polynucleotide
tgtgttagtgttaggttggatttagtgagttgttgatgttagtgagatgttaggttggatttagtaagttgttgatgttagttagatgtagagtagagaatgttggttaaagagtagttaggtggtgtttgtttggttgaagtttagttttggagaggtaggttttgtattaggatgtggaggttttggggttatgaaatttttagggtgagagataaaggtagtgagtggttgtttagggtagaggggatggaggtagtatgtggatggagtttttgtatagagtgttatggttatgattggaaagtttagatatgtgttatgagtttatagtttaggttagaggtggtaggatggtgggtggttttatgtatagaattgtggttatgtgtggaaggtgatggatattggtgg

SEQ ID NO: 15631 - DNA, 987 bp, Artificial Sequence
  Description of Artificial Sequence: Synthetic polynucleotide
tgaggagtttgtgtttttaggattggattgatttattttgaggttgatgatgggtatggttgtgtggttggtatggtgtatgatgttgtataggttttgtaggtgtgaggataggaaggtgtggaaggtgtttgttagttttatggtttgtgtttgttggaagtattggaagttggttttgtggatgttttgtatgttgtttgatagggggttgttgagtgtaattaggtggagttgtggggagaggggtgtgttatgggttgtgttttatgttgttttttgtatttaggttttgggtgtattattttggttttgtatttgtgtggataggtatggttgaggggtgttgagtgggaggtgtgtaagtgatatattgaggggtttaggtagtagtttttatatgttgttaggttagagtagttttgggttatgtgggtgtttttagttgttgttgtaggtggaggtatgttggttttttaaggatgtgatagtggttggatttttatgattattgtttggttattagagggtaagttttagggttagttaagttgttttgagtggttttgagttgttagatttttatttatggttgaagtttgggatttttagtagttttgtaggggttgggtttttttttgttgttgagagttgaggggttagatggagttaagtttattttgggggggtatttattattggttggaagttgtggtggttgtgggtgggtgggtttgtgggttgtgttggttgtaggtgtatgtaggagttgtggtgtggggttttggggtagggttggggtttgggtaggtgaggggggttggttaggatgttatttgtttgttagggttgtgtggtggggtgggggtgtttttgttgtgggtaggggttgttgttgtgtagttgtattatggggggttgtaaggtggttattttattgttttgtaggtgggagatgtggggtttgttggtggggggattttttgg

SEQ ID NO: 15632 - DNA, 1061 bp, Artificial Sequence
  Description of Artificial Sequence: Synthetic polynucleotide
tggggtagggggtggttgttgtaagggtgggatttgtgggttttgaggtttttttggtggtggagatgtgttgaggttgtttttattttaagttttttttttaggtggtgagttggttgggtttggattttttgtgtttttttagttttaaggagtggattattgagtgagtttttgtttttttgttttttttttattttttttgggttttgttttttgggttttgtggggtgttggggtttttgtgtggagatttggttgagtttttttagtgtttttttttgggtgtttatttggtttgtgttaagttggggtttgggggttgaggggggtatagagattttggttgggtttttgtaggtttttagttgagtggttatttttttgtgggtgtagatgggtgtggggtttggggttgttttgggaggattgtgttttttttattaattttggttagatttgttgagttgtgtttattttgtaggtatttggtttttgagtgtgggtttgagtgaggtttgggtagtaagtttttgtgtgtttttgtgggggaggtgggtgtttgttttgtggtttttgggggtggtttggtggtggtggttgttgtggttatggtgagtgtggggggaggggtaggggaggtgtagttgttggggggagggtggggagggggaagggtgttgttggggggagggtatggggtggggagggtgtggtggggttgttttgggtggagatgtgggggttatatgggtgggatttttgtagggattatttgggtttttggttttttttggggttggttttgggttgtttggggtttttgtgatttttatatttattttttttgtagggtgtggtgttgggttttatggtgggttttatgatttatgggtggtgttaattttagtttttggatatgatgatgtggtgtttgattttgtttttttgtgaggttttggttaagttaattatgttggtggatgttgatgttgaggtttttattgtttatttggtgagtggtggttatagtagggttttttgggttttattaatagtga

SEQ ID NO: 15633 - DNA, 382 bp, Artificial Sequence
  Description of Artificial Sequence: Synthetic polynucleotide
tggatggtaaatatgtgtgggttttttgtgtgtttgatggtaaagatgtatgggttttttgtgtgttggatggtaaataggttttgtgtgggttttttgtgtgttggatagtaaatatatgtgggttttttttgtgttggatagtaaatatatgtgggttttttttgtgttggatagtaaatatgtgtgggtttttttgtgttggatagtaaatatgtgtgggttttttttgtgttggatagtaaatatgtgtgggtttttttgtgttaaatggtaaatatgtgtgggttttttgtgtgttgaatagtaaatatgtgtgggttttttttgtgtttgatagtaaatatgtgtgggttttttgtgtgttggatgataaatatgt

SEQ ID NO: 15634 - DNA, 261 bp, Artificial Sequence
  Description of Artificial Sequence: Synthetic polynucleotide
tgttgattaggaggattggtggtgattttggtttttagtgtttttgatagagtgaaatggtggtggtggttgggatgatgttgttgggtttgttataggtgggtgggtaggtgttgggttaggtgatggaggaggtggtaggtggtaattttttgtttatgttgttgattgtttgtgtttttatttttagtttggtttatttgttttgttttgttgttggttatttggtttagttgattgtaggggtgaaaagttttttgt

SEQ ID NO: 15635 - DNA, 892 bp, Artificial Sequence
  Description of Artificial Sequence: Synthetic polynucleotide
tgtggggttgtttaagtgttggtggaggttgggttgggttgttgtgtgtttgttttttttttttgtgttttttttgttgttttaattttgttttggttatgagggagtttgtgtttatgtagattgggtagtgtgggaattagattggtgttaaggttggtagttggggttttgagggtttagtttgggtttgttgggtggttggggaagatgttggtagtggtgggggtggtgtttttgtattgtggtttttgggttttttgttggggatggtggaattgggtggttggtgaggtggtgggggtggattttagggatagggtggtttggggatgggggtgtggatgggggtgggagagtggttggggtgtttttgtgatttagttttggtttgtttggttttttttgtttttgtagttttgggaggtgatttttgatgaatatgttattgattttgttggtatttattatggggatagttatttgtagttggagtgtattaatgtgtattattatgaggttagtggtgtgatttttgttttttttttattgtttttttgggaatgtggttttttttttgtttatgtttttttgttttatgtaggtggtaggtatgtgttttgtgttgtgtttgtggatttggagttgggtattatggattttgtgtgtttggggttttttgggtaggtttttaggttagataattttattttttgtgagttgtgggtgaggattggggtgtggttttttagttagggtagtttgaaatttaggaatgttttaaggttattttgtgggaattgtggtgttagggtttttgaatatttttttgttttttgagttgagttgttttatttgttttttaaatgggttttgggaggaaggtttgtgt

SEQ ID NO: 15636 - DNA, 682 bp, Artificial Sequence
  Description of Artificial Sequence: Synthetic polynucleotide
tgtttagtaggtggtattgtgttttgatgttggggatttagtatttagttgtttttgtttgtaggtgttttggttttgttttggttttttttggtttgtgttttgattttgttttttgttgtttagaatgttgtagttagggtggtatataagttttgaggggtggggtttgggggttttttttttatttgttttttgtttttttttttgttggatttgaggtgttgtttttgttgtgttgtttttgtgttatgttatgttatgttatgttatgttatgttatgtttttatgttatgtttatgttatgtttttattttttgtttatagggaaatgggttttggtgatgtgagggtgtttgttgtgtttggtgtttttataggggagttttttgttttggttgtggttttaggttttgtgttgatgtagtaggagggtttttgggtagtttaggtaggtgatggggagtgatgagggttttttatagttatgggagttgagtttagagtaggtggtagtagtgtttttgttatttttggtttaaaagtagttgtgtggggtttttgataggtgttttggagtgaattgttttttttggtttagtttttagggttttgttagggtttttgttgtttagaaggtttggggtttggttgatgatttgttatattgtgggtttttgg

SEQ ID NO: 15637 - DNA, 223 bp, Artificial Sequence
  Description of Artificial Sequence: Synthetic polynucleotide
tgaaaaatagaggtgttgggtgtgaggtggagagatgtataggtttggttttggttttgttttttgtttgttttaaagggtaaggtttttttgttttgtgttttgtttttgttttatttaggttttgttattatgtttgggggttttatttgggattggtttttgttttgtgtagtaaatttggaagtggattatgtggagtaaaggttttattgaggtgtgt

SEQ ID NO: 15638 - DNA, 255 bp, Artificial Sequence
  Description of Artificial Sequence: Synthetic polynucleotide
tgggaggttgggtttggtgtatgggggttgggtatattttttttgggtatttttaggataggtgaggaatgtattggttgggattttatttatgagtaggagggtaaggtgtagtttgtgattgatgtggtgtatgttattgtttatgttttttatagtatgtattaggtgttttgttttgggtatataggtttgtgtttggtgatggaatttattgatgggtggatgtttttgtagtatatttgagttgtttgt

SEQ ID NO: 15639 - DNA, 309 bp, Artificial Sequence
  Description of Artificial Sequence: Synthetic polynucleotide
tggtaggtttgttgtgtttgttttagttagggtttagagttttttggttagtttattgtatttggattttagatgggtgtgttgggtggtgtttgtgttagggaaagagttggtggttggttgagttgttgtgtttttgagtgttgtgtttgttgtgattattggtgtggttgttttttggtaggtttgaaggaattgttgtttttttgtatgttgatggttagtgaggaggttatggtggtgttggaggaggtggtgttgtatgttttttagtagtgtgtttattatgtttttaaggtgtatggatgg

SEQ ID NO: 15640 - DNA, 992 bp, Artificial Sequence
  Description of Artificial Sequence: Synthetic polynucleotide
tgtgtgtttttttgggaaattgattttttttgggatgggtttggatattgaggggtgggtttttgagagttgttggggttttggtgtgggggtggttagggatatggagagtttgtggtgatagtattttagttatgttgttttagtaattagtgattagatatgggatgttttttttgtgtgttgtttgtgttatgtttgttttgagtggagtttttgttttaggatagtttggtgtatgtgtttaattgggattggtatatggtgggttagtggattttttttagtaagtttagtattagttttttagtttttgatattttgtttttatattgtattatttgttggtaattgtttttggatagtggttaggttgtggggaggttggttttggagtttatttttggggtgtatatttttgttaatttttttgaggtggggtataggattgtggtgttgtattatggggatttgttttttttggggttttattatttgttgttatttaaggattttgtgtaggtttagtttttgtttgtttgggttttggtgtgtttttgggttgtgttgtagagttgttggttgtgtggggttgtgtttggggtttggggagttgttttttttatttaggttgttttgttttggtgttagtagttgtttttggagtttgagttttatttggaggatatgttgttgtagaggattatgatgttgattgagttggggggtgatgattataagttgatttttgttttttttttgtgtttttgtatttagtatttggttatttatttttagttgggtatatttgggtagtttttgtttaagatagttaggttgatttgtgagattgtttgggttagtgtgttggggtgggtggtttgggttttgtgttggtttgggggaagagggggtttggagttggttttggttgggaggtgggagtgtttttatttgatttttatggtgttgtgttgttgagtgtagggtgg

SEQ ID NO: 15641 - DNA, 265 bp, Artificial Sequence
  Description of Artificial Sequence: Synthetic polynucleotide
tggggttgtttgtgaatatgttaagtataatggggttgttgattgtgaatatgttgaataaaatagggttgttgtttgtgaatatgttaaataaaatggggttgttgtttgtgaatatgttgaataaaattgggagtttgaatttttttatgttaaataaagagtagggtttgaattttttttttaggagggttagggttgtggttgggtgatgttaggtggggaagatattagaagaggagaaaattaggagtgtaggatgtgg

SEQ ID NO: 15642 - DNA, 488 bp, Artificial Sequence
  Description of Artificial Sequence: Synthetic polynucleotide
tgtttgtgtttggtgggagaggatatggttttttaggtgtgttgtagaagttgattggagaaggtttgtgattttgttgagggttaaagaggaattggaaagggtttggggtagatgtgggtgttatagggtgagttgggttaggttgagaggatttatgggttatgggagtttgtgggtgatggtttggtaggggtttgtggtgggaatagggataaaatatatttaataaattgtttatttagagtaagttgtgtgggtataatggtgagaaaatggttagtaatggagatgttgttttgtagttgtttatttttttttttttaggtgtgtattggatggttgagtgattgtgaggttttagtggggttggtgatagaattaaggtgtgttgaagtgtgtggtagtatttttgttttagggtgtttattagaggggtaaaagggtaaaagagagagttttttttttattatgtttgtttttgttgg

SEQ ID NO: 15643 - DNA, 676 bp, Artificial Sequence
  Description of Artificial Sequence: Synthetic polynucleotide
tgttggatgaattttgtttttttagaagaaagttgggttggtgtgtttgatgatgtagtgtttgtagtggtgtttgataaagtgtagggtttttatggagattttgtagttttggatatttagtgtttggaggttaaagtagttggtggttatgatttgtaagttttggttggtgatgtttttgtaggatttgaggttgagttgtttgaggttgaagtagtttagggttaggtattttaggtttgtgttggatattaaagggtatttgttgatatttagggatttgagtttggtgtagtttttggtgaggtattttatattgtggtttgtgatgtttttgtagttttttgtgttgaggtagtgtagtttgttgtagtatttggttatgtagtggatgtttatgttggtgatttggttgtagtgtgtgatgtttaggtattgtaggtgggattttagtttggtgattttttgtaggttgaagttgttgatgaagtggtagttgttgatgtttagttttttgatggaggtgtagtagattattaggtagtgtaggtttttgttggttaggtggatgtagtggtgtaggtagaggtgggtgagttgtgtgtagtgtgttgtgatggtgtgtaggtttttgttttttagtatgaagtagtttgttatgtttaggtagtgg

SEQ ID NO: 15644 - DNA, 1238 bp, Artificial Sequence
  Description of Artificial Sequence: Synthetic polynucleotide
tgatagattatttaggttgtatagagtgtgtgtataaggttgttgttttttttgtgatgtaagattttattttttggatgttagtggtttggaagtgtaatgttttttgggtaatgttattgttgtagttttgggtgggggagggatgattaaagataatggttgtaagagaattttataagagagttagaatgaaaatgtgtaataagtgtggtggtttttattatggtaggtgatttgaggatttagtatgaggtgagagtagggattaggaagagttggaaaatttgtttgtgattggttgtttatgggtattggttgttgtgattgggtgaggtttagatagatagttgtgttttgaattgtgtagggttttgggtagtaaaggttttgtaaggtttttaattgaaagggggagggggaaggttgttaataaatggttgagtttataattttggttggggtgttttttttttttatggagagagttagatttgagttgttgttttagttgtgtttgttgtgttttgttttgtttttgttgttggttgagggtatttttttttgggtagtagttatggagttttttttgttgttttttatattgagtgtggtagttagtgtgattttggttttgttgtgtggggaggtagtggtgtttggtttatagtttgtggtgtggtggttgttgtaggtgaagttagagtaggtgttgttgttattatagttttaggtttagaatgaggaagttgttgttttgtttgtgtaggtgtggttgttgtagtttaggtttgatttgtggtttttgtagttgttgatagtgttagatggtgttatttttaggtttgagttgtatttggtgtagtttttggtgttgtatgttaaggttaagaagtagaagttggggtttagtttggattagttagtggggttttgaggggttgttgaaattggttttagagtttttagggtggttaagttggaaggttttgggttggtttttggttatttttgaggggatgagaagggtaagttggaggtggaggaggttatgagagatttgatgtaaggtggggtaggtaaaagtttggtagttatttgagaaggtgtgattaaaatggaggaatttgagagattttttgaggattgtaggtttggtgtggagtttgtgtttaatggtttggtttatggtagtgtggaggttattttggttttaatgtttggtgtttttgggttgt

SEQ ID NO: 15645 - DNA, 220 bp, Artificial Sequence
  Description of Artificial Sequence: Synthetic polynucleotide
tgggataggttgggtgttggtatttagtggttgtaggggttgttgtgtgttttgtagatggatatgtgttatttaatatagagatgtgttgagtttgggtgattagtgaattgtatgttattgtagatattagaaagtgaaagtatatgggggaaggttttgggtatagatttagtatggttattatttgagttggagttgtttgtgagatgatgagtgt

SEQ ID NO: 15646 - DNA, 631 bp, Artificial Sequence
  Description of Artificial Sequence: Synthetic polynucleotide
tggtattttaagtatgtgagtttgtgtaggaggtgttttgttttttggagttttttattgttttttagatatagttttggttttttattttgggtggaggtttttttagatgggttttgattgtttttgtatgtttattgttgttgtgttagaagttattgttttttttttgtttttttttaaatgtgttttgttttaggtttgtgttatgttgttttttgtgttgtttttgtttgtttttttattttttgttattagaattgggaaggtggtgttttttttttaggtttaatttttggtattgaatttttaggagtttgtagttttttttgtttgggtttttttttgttggtttagattgtagggttagtagttttgtttatatggaagttttgtttattaggttgattttgttttttttgttttggttttgtttttgttttggttttgtttttttgttggtagttggtaggtgtagttggggttgtgggatttaggaggggtttttagtaggtgttttggtgaagattttggattgtgttatagtttagggtagttgttttgtggtttggttttggagttttttatggatatttggggttttgttttttttgaaattattttttattgt

SEQ ID NO: 15647 - DNA, 904 bp, Artificial Sequence
  Description of Artificial Sequence: Synthetic polynucleotide
tggtagaagatttgtttttttttgtttgaaaggtgttgtttagttggtagtgtaatggtaggagtttgggttatgtgagtgtggggtggatgttggaggggaaggttgggagttggttttgtggaaaaggtttttgtgtgttttggaatatgttgttgggttggtggattttgttgtttatttttgtggatgaaatatgtatgttatattatataagggattaggtggaagaatgaataggttggtttaagtatatgttttggttggtgtttggagagtgggtatttttttttgttatattgaggagttgtttttttagatggatgtgatatgatttttttggttttttattgttatagtgtgagaggtgggggtttgagatttgatgttgtttaggttatagtagtgggtggtgtgttggtaggtgtgtgtttgttagatttggtgtgagtgtagtttaataatgaatttgtaggttgtttgttgttatgtatgtggttattgttttagttttgtttttttttaggttttgggatgtttggggtgaatggggaggtggttgttttaagggaggatttaggtagtgttggttttttgtttggggtttttttttagatttttgtttgaatgagtgggatagtttttgttttttagtgtgtttttaggttttgggatggttattgtttaggaggtgtttggttttgtttatttgtttgttttgtttattttttgagaattttgtgattttgaaatttttttgatttttttgttggaagtaatttgttttatgtgaaattatgggttatttttttatatttgtagagtgttttattttttgtaatgtttatttgtgaaattgttgtgttaggttaggagtattttaagagtgagaggtagatgttgt

SEQ ID NO: 15648 - DNA, 519 bp, Artificial Sequence
  Description of Artificial Sequence: Synthetic polynucleotide
tggtggttgtattttttgtagatgtgtatggtttaggttgtgatgatttaggaggagatgttgaagattagtagtatggtgttggggtagatggttatgagtgtttttatgatgaagtgtgtgttgaaggtgattttgttgagggttttgatgttgtggtttgaggtgtttgtgaagattttgttgtgtagtagtattatttggtttagtaggtagaggtgtaggaatatggggatggatagtagtatgtttatgttggttttggttattgagggtgtgtatgtgaaggttagttgtgttgtttatgtgaagtggtagtggttgggtattgggtgaatggtgtatattgttagttttagtgagatgaggaatatgtgtttgtaggttatggtgatgtgttagttattagttttgttgtttattatgaatagttgtggagggtgggagggaattagttatgggtgttagatatgtgttgtgttttttgtttagttttattgtgtttttagagagtgatgt

SEQ ID NO: 15649 - DNA, 204 bp, Artificial Sequence
  Description of Artificial Sequence: Synthetic polynucleotide
tgtgtagggaggtgtagatgtaggtttgtggggaggtatgtggtagtaggatttatttttggggtgttttgggttggtgaatttatatttttttatgttaatggtttgtagtatttgtagtttgtgggttgagttggttgtggggggtttattggtggtaggggtattattggggagagtggtggatggttgggttggtggtgg

SEQ ID NO: 15650 - DNA, 444 bp, Artificial Sequence
  Description of Artificial Sequence: Synthetic polynucleotide
tgtggttgattgttattttattttgaaatatgtagaggggaaggtagtttgagggtttttttttttaggaagtttttgggtagttgttgttgggtgttaggataagtgagggtggtttgagttttgtgtttatatggtgtatgttgtttagtagatgatattgatggttgtaaatgttgtagggaatatagtgtgggtgtaaatgttaatggtgtttgtgttgatgggtttgagttgggtatggatgtttttttggttttttgagtgggttgttttttttttttttgttttttttgtttttatttttattgatttgtaggagtttattaggttttttgggatgtggtgttgttggtgggagatggttagtttttgtgtgatgttggtagtagagagggagaagaggataatggtgttttttatgtttatttgtatgaaggttgg

SEQ ID NO: 15651 - DNA, 397 bp, Artificial Sequence
  Description of Artificial Sequence: Synthetic polynucleotide
tggaagttgagtgtgttttgagtaggtttattatttagggtgggggtgggtggatgtgtttttattgtttgttgttggtttttagttggttttggtgaggtaggagtttttggggttatttgtttgggtttatttttgttttggttttgtagtgtttgtggagtttggtgggaggagttggtttgagttattgttattatttggttttttttgttgagagtggattttgtgtgtgtgttttttaggaatggtgataagtatgatggtgattgggtttgggattggtgttagggatatggggtgttgtgttgtgttgatggttttatttataaggtatttgggggtgtgtggtatttgttgtttagagggtataggttttgtggtgggtagggtgtgt

SEQ ID NO: 15652 - DNA, 1530 bp, Artificial Sequence
  Description of Artificial Sequence: Synthetic polynucleotide
tggttgtttttgtttttaaaattgttttggtgtgtgtttggttgtttttatatttgttgtggtgtgtgtttagttgttttatgtattgagtggttatgtttatggtttttgtttttggtagttgtaggttttttgaaatgttgtattgtaggttgttttagtttgagtgtagtagtttgaagtttatggtgtttatgttgaatgtgtgttgttagttgatggtgtttttatgttagtgtttgagtgttgggtttgtggtttttttgttgttttttgatgtggttttgttgtttggggttttattgtttttttttttttttttttttttgttttttttgggtagttgtggtttggatatttgggataagtttaggaaggaggttatgggttgtgttttggaggataagtttgagtttattgtgggtgttgtaggttttagtgtgtgtgtttggtttttttggtttttttgggtggtttgtgtttgggttgggggttttggttgtgtggtttgggggttgttggttttgtggttgtggggttggggtgggtgtgggggtgtttgtagttgtattttgggtagaggtttggggtgtaggaagatgttagggaagggtggttagggtgtatgtggtgttggggtttggggggatgtttgttgttttggttgtattttggttatgtatatttttgggggtggttgttttattgtagggtgtgggggtggagtttggtttaagaagagtggtaaagggtgggtggttttggtggtttagtttagggtttgggagtgtttgggggtttttttgttttgggggtggggaggggttggtggggtgagggtggttttgggttgggtgggggttgttggggtgggggattgggggttgtttttgggtggggttgttttggtgggttttaggttgttgagtagtttttttttgtttttgttgtttaggaagtttgtgggaaatgtgggttagaagttttttgtgtaggtgggtgtgggttaggggtgttgtggatatttattgtttgggttgaggaagaggaaggtttggtgttgtattttgttttttttatttttattttttttttttttgtttatttttatgtatttatagaatttaaatttggggtgtggtggggtattagagttgagttttgttttgtttattttgttttgtattagtttggttgtgtgtttatttttttagatatagtggagatttgtggtagaagtatttgttgtttgtttttatgtgggtgaggtgagtgtagttgttgggataaatgaaggataggtatatttggggggtgggggggtgtagggtttagggtgtggattttttggggtggttttttaaggggttggagaaggttttgtggagttttggatgggagatggggtttttagttgtatttataaattgtaggttttggtatttggtgattgggaagtttttgattatgtaggtgggggtgtaggtgtagggttttagtatgttttttaggtttgaagattttatgtgt

SEQ ID NO: 15653 - DNA, 2 bp, Homo sapiens
cg

SEQ ID NO: 15654 - DNA, 9 bp, Homo sapiens
cgaatggcg

SEQ ID NO: 15655 - DNA, 36 bp, Homo sapiens; identical to SEQ ID NO: 12683

SEQ ID NO: 15656 - DNA, 8 bp, Homo sapiens
cgacggcg

SEQ ID NO: 15657 - DNA, 181 bp, Homo sapiens; identical to SEQ ID NO: 12705

SEQ ID NO: 15658 - DNA, 369 bp, Homo sapiens; identical to SEQ ID NO: 12716

SEQ ID NO: 15659 - DNA, 2 bp, Homo sapiens
cg

SEQ ID NO: 15660 - DNA, 35 bp, Homo sapiens; identical to SEQ ID NO: 12738

SEQ ID NO: 15661 - DNA, 487 bp, Homo sapiens; identical to SEQ ID NO: 12749

SEQ ID NO: 15662 - DNA, 28 bp, Homo sapiens
cgtcttgatctcctgacctcgtgatccg

SEQ ID NO: 15663 - DNA, 2 bp, Homo sapiens
cg

SEQ ID NO: 15664 - DNA, 18 bp, Homo sapiens
cgcgccttcctgaccgcg

SEQ ID NO: 15665 - DNA, 18 bp, Homo sapiens
cgcaggtcagtgagtgcg

SEQ ID NO: 15666 - DNA, 87 bp, Homo sapiens; identical to SEQ ID NO: 12794

SEQ ID NO: 15667 - DNA, 11 bp, Homo sapiens
cggagcttgcg

SEQ ID NO: 15668 - DNA, 2 bp, Homo sapiens
cg

SEQ ID NO: 15669 - DNA, 167 bp, Homo sapiens; identical to SEQ ID NO: 12825

SEQ ID NO: 15670 - DNA, 2 bp, Homo sapiens
cg

SEQ ID NO: 15671 - DNA, 2 bp, Homo sapiens
cg

SEQ ID NO: 15672 - DNA, 2 bp, Homo sapiens
cg

SEQ ID NO: 15673 - DNA, 185 bp, Homo sapiens; identical to SEQ ID NO: 12829

SEQ ID NO: 15674 - DNA, 17 bp, Homo sapiens
cgagccgaagcagggcg

SEQ ID NO: 15675 - DNA, 135 bp, Homo sapiens; identical to SEQ ID NO: 12831

SEQ ID NO: 15676 - DNA, 2 bp, Homo sapiens
cg

SEQ ID NO: 15677 - DNA, 71 bp, Homo sapiens; identical to SEQ ID NO: 12833

SEQ ID NO: 15678 - DNA, 54 bp, Homo sapiens; identical to SEQ ID NO: 12834

SEQ ID NO: 15679 - DNA, 5 bp, Homo sapiens
cggcg

SEQ ID NO: 15680 - DNA, 29 bp, Homo sapiens
cgccggtttttaagcccgtaggaaaagcg

SEQ ID NO: 15681 - DNA, 18 bp, Homo sapiens
cgctttctagtgtctgcg

SEQ ID NO: 15682 - DNA, 2 bp, Homo sapiens
cg

SEQ ID NO: 15683 - DNA, 5 bp, Homo sapiens
cgacg

SEQ ID NO: 15684 - DNA, 24 bp, Homo sapiens
cgaagcgcctcctgcgcagactcg

SEQ ID NO: 15685 - DNA, 2 bp, Homo sapiens
cg

SEQ ID NO: 15686 - DNA, 4 bp, Homo sapiens
cgcg

SEQ ID NO: 15687 - DNA, 2 bp, Homo sapiens
cg

SEQ ID NO: 15688 - DNA, 12 bp, Homo sapiens
cggggcaggtcg

SEQ ID NO: 15689 - DNA, 2 bp, Homo sapiens
cg

SEQ ID NO: 15690 - DNA, 80 bp, Homo sapiens; identical to SEQ ID NO: 12875

SEQ ID NO: 15691 - DNA, 4 bp, Homo sapiens
cgcg

SEQ ID NO: 15692 - DNA, 3039 bp, Homo sapiens; identical to SEQ ID NO: 12897

SEQ ID NO: 15693 - DNA, 2 bp, Homo sapiens
cg

SEQ ID NO: 15694 - DNA, 9 bp, Homo sapiens
cgccattcg

SEQ ID NO: 15695 - DNA, 36 bp, Homo sapiens; identical to SEQ ID NO: 12920

SEQ ID NO: 15696 - DNA, 8 bp, Homo sapiens
cgccgtcg

SEQ ID NO: 15697 - DNA, 181 bp, Homo sapiens; identical to SEQ ID NO: 12942

SEQ ID NO: 15698 - DNA, 369 bp, Homo sapiens; identical to SEQ ID NO: 12953

SEQ ID NO: 15699 - DNA, 2 bp, Homo sapiens
cg

SEQ ID NO: 15700 - DNA, 35 bp, Homo sapiens; identical to SEQ ID NO: 12975

SEQ ID NO: 15701 - DNA, 487 bp, Homo sapiens; identical to SEQ ID NO: 12986

SEQ ID NO: 15702 - DNA, 28 bp, Homo sapiens
cggatcacgaggtcaggagatcaagacg

SEQ ID NO: 15703 - DNA, 2 bp, Homo sapiens
cg

SEQ ID NO: 15704 - DNA, 18 bp, Homo sapiens
cgcggtcaggaaggcgcg

SEQ ID NO: 15705 - DNA, 18 bp, Homo sapiens
cgcactcactgacctgcg

SEQ ID NO: 15706 - DNA, 87 bp, Homo sapiens; identical to SEQ ID NO: 13031

SEQ ID NO: 15707 - DNA, 11 bp, Homo sapiens
cgcaagctccg

SEQ ID NO: 15708 - DNA, 2 bp, Homo sapiens
cg

SEQ ID NO: 15709 - DNA, 167 bp, Homo sapiens; identical to SEQ ID NO: 13062

SEQ ID NO: 15710 - DNA, 2 bp, Homo sapiens
cg

SEQ ID NO: 15711 - DNA, 2 bp, Homo sapiens
cg

SEQ ID NO: 15712 - DNA, 2 bp, Homo sapiens
cg

SEQ ID NO: 15713 - DNA, 185 bp, Homo sapiens; identical to SEQ ID NO: 13066

SEQ ID NO: 15714 - DNA, 17 bp, Homo sapiens
cgccctgcttcggctcg

SEQ ID NO: 15715 - DNA, 135 bp, Homo sapiens; identical to SEQ ID NO: 13068

SEQ ID NO: 15716 - DNA, 2 bp, Homo sapiens
cg

SEQ ID NO: 15717 - DNA, 71 bp, Homo sapiens; identical to SEQ ID NO: 13070

SEQ ID NO: 15718 - DNA, 54 bp, Homo sapiens; identical to SEQ ID NO: 13071

SEQ ID NO: 15719 - DNA, 5 bp, Homo sapiens
cgccg

SEQ ID NO: 15720 - DNA, 29 bp, Homo sapiens
cgcttttcctacgggcttaaaaaccggcg

SEQ ID NO: 15721 - DNA, 18 bp, Homo sapiens
cgcagacactagaaagcg

SEQ ID NO: 15722 - DNA, 2 bp, Homo sapiens
cg

SEQ ID NO: 15723 - DNA, 5 bp, Homo sapiens
cgtcg

SEQ ID NO: 15724 - DNA, 24 bp, Homo sapiens
cgagtctgcgcaggaggcgcttcg

SEQ ID NO: 15725 - DNA, 2 bp, Homo sapiens
cg

SEQ ID NO: 15726 - DNA, 4 bp, Homo sapiens
cgcg

SEQ ID NO: 15727 - DNA, 2 bp, Homo sapiens
cg

SEQ ID NO: 15728 - DNA, 12 bp, Homo sapiens
cgacctgccccg

SEQ ID NO: 15729 - DNA, 2 bp, Homo sapiens
cg

SEQ ID NO: 15730 - DNA, 80 bp, Homo sapiens; identical to SEQ ID NO: 13112

SEQ ID NO: 15731 - DNA, 4 bp, Homo sapiens
cgcg

SEQ ID NO: 15732 - DNA, 3039 bp, Homo sapiens; identical to SEQ ID NO: 13134

SEQ ID NO: 15733 - DNA, 2 bp, Artificial Sequence
  Description of Artificial Sequence: Synthetic oligonucleotide
yg

SEQ ID NO: 15734 - DNA, 9 bp, Artificial Sequence
  Description of Artificial Sequence: Synthetic oligonucleotide
ygaatggyg

SEQ ID NO: 15735 - DNA, 36 bp, Artificial Sequence; identical to SEQ ID NO: 13157
  Description of Artificial Sequence: Synthetic oligonucleotide

SEQ ID NO: 15736 - DNA, 8 bp, Artificial Sequence
  Description of Artificial Sequence: Synthetic oligonucleotide
ygayggyg

SEQ ID NO: 15737 - DNA, 181 bp, Artificial Sequence; identical to SEQ ID NO: 13179
  Description of Artificial Sequence: Synthetic polynucleotide

SEQ ID NO: 15738 - DNA, 369 bp, Artificial Sequence; identical to SEQ ID NO: 13190
  Description of Artificial Sequence: Synthetic polynucleotide

SEQ ID NO: 15739 - DNA, 2 bp, Artificial Sequence
  Description of Artificial Sequence: Synthetic oligonucleotide
yg

SEQ ID NO: 15740 - DNA, 35 bp, Artificial Sequence; identical to SEQ ID NO: 13212
  Description of Artificial Sequence: Synthetic oligonucleotide

SEQ ID NO: 15741 - DNA, 487 bp, Artificial Sequence; identical to SEQ ID NO: 13223
  Description of Artificial Sequence: Synthetic polynucleotide

SEQ ID NO: 15742 - DNA, 28 bp, Artificial Sequence
  Description of Artificial Sequence: Synthetic oligonucleotide
ygttttgattttttgatttygtgattyg

SEQ ID NO: 15743 - DNA, 2 bp, Artificial Sequence
  Description of Artificial Sequence: Synthetic oligonucleotide
yg

SEQ ID NO: 15744 - DNA, 18 bp, Artificial Sequence
  Description of Artificial Sequence: Synthetic oligonucleotide
ygygtttttttgatygyg

SEQ ID NO: 15745 - DNA, 18 bp, Artificial Sequence
  Description of Artificial Sequence: Synthetic oligonucleotide
ygtaggttagtgagtgyg

SEQ ID NO: 15746 - DNA, 87 bp, Artificial Sequence; identical to SEQ ID NO: 13268
  Description of Artificial Sequence: Synthetic oligonucleotide

SEQ ID NO: 15747 - DNA, 11 bp, Artificial Sequence
  Description of Artificial Sequence: Synthetic oligonucleotide
yggagtttgyg

SEQ ID NO: 15748 - DNA, 2 bp, Artificial Sequence
  Description of Artificial Sequence: Synthetic oligonucleotide
yg

SEQ ID NO: 15749 - DNA, 167 bp, Artificial Sequence; identical to SEQ ID NO: 13299
  Description of Artificial Sequence: Synthetic polynucleotide

SEQ ID NO: 15750 - DNA, 2 bp, Artificial Sequence
  Description of Artificial Sequence: Synthetic oligonucleotide
yg

SEQ ID NO: 15751 - DNA, 2 bp, Artificial Sequence
  Description of Artificial Sequence: Synthetic oligonucleotide
yg

SEQ ID NO: 15752 - DNA, 2 bp, Artificial Sequence
  Description of Artificial Sequence: Synthetic oligonucleotide
yg

SEQ ID NO: 15753 - DNA, 185 bp, Artificial Sequence; identical to SEQ ID NO: 13303
  Description of Artificial Sequence: Synthetic polynucleotide

SEQ ID NO: 15754 - DNA, 17 bp, Artificial Sequence
  Description of Artificial Sequence: Synthetic oligonucleotide
ygagtygaagtagggyg

SEQ ID NO: 15755 - DNA, 135 bp, Artificial Sequence; identical to SEQ ID NO: 13305
  Description of Artificial Sequence: Synthetic polynucleotide

SEQ ID NO: 15756 - DNA, 2 bp, Artificial Sequence
  Description of Artificial Sequence: Synthetic oligonucleotide
yg

SEQ ID NO: 15757 - DNA, 71 bp, Artificial Sequence; identical to SEQ ID NO: 13307
  Description of Artificial Sequence: Synthetic oligonucleotide

SEQ ID NO: 15758 - DNA, 54 bp, Artificial Sequence; identical to SEQ ID NO: 13308
  Description of Artificial Sequence: Synthetic oligonucleotide

SEQ ID NO: 15759 - DNA, 5 bp, Artificial Sequence
  Description of Artificial Sequence: Synthetic oligonucleotide
yggyg

SEQ ID NO: 15760 - DNA, 29 bp, Artificial Sequence
  Description of Artificial Sequence: Synthetic oligonucleotide
ygtyggtttttaagttygtaggaaaagyg

SEQ ID NO: 15761 - DNA, 18 bp, Artificial Sequence
  Description of Artificial Sequence: Synthetic oligonucleotide
ygttttttagtgtttgyg

SEQ ID NO: 15762 - DNA, 2 bp, Artificial Sequence
  Description of Artificial Sequence: Synthetic oligonucleotide
yg

SEQ ID NO: 15763 - DNA, 5 bp, Artificial Sequence
  Description of Artificial Sequence: Synthetic oligonucleotide
ygayg

SEQ ID NO: 15764 - DNA, 24 bp, Artificial Sequence
  Description of Artificial Sequence: Synthetic oligonucleotide
ygaagygttttttgygtagattyg

SEQ ID NO: 15765 - DNA, 2 bp, Artificial Sequence
  Description of Artificial Sequence: Synthetic oligonucleotide
yg

SEQ ID NO: 15766 - DNA, 4 bp, Artificial Sequence
  Description of Artificial Sequence: Synthetic oligonucleotide
ygyg

SEQ ID NO: 15767 - DNA, 2 bp, Artificial Sequence
  Description of Artificial Sequence: Synthetic oligonucleotide
yg

SEQ ID NO: 15768 - DNA, 12 bp, Artificial Sequence
  Description of Artificial Sequence: Synthetic oligonucleotide
yggggtaggtyg

SEQ ID NO: 15769 - DNA, 2 bp, Artificial Sequence
  Description of Artificial Sequence: Synthetic oligonucleotide
yg

SEQ ID NO: 15770 - DNA, 80 bp, Artificial Sequence; identical to SEQ ID NO: 13349
  Description of Artificial Sequence: Synthetic oligonucleotide

SEQ ID NO: 15771 - DNA, 4 bp, Artificial Sequence
  Description of Artificial Sequence: Synthetic oligonucleotide
ygyg

SEQ ID NO: 15772 - DNA, 3039 bp, Artificial Sequence; identical to SEQ ID NO: 13371
  Description of Artificial Sequence: Synthetic polynucleotide

SEQ ID NO: 15773 - DNA, 2 bp, Artificial Sequence
  Description of Artificial Sequence: Synthetic oligonucleotide
tg

SEQ ID NO: 15774 - DNA, 9 bp, Artificial Sequence
  Description of Artificial Sequence: Synthetic oligonucleotide
tgaatggtg

SEQ ID NO: 15775 - DNA, 36 bp, Artificial Sequence; identical to SEQ ID NO: 13394
  Description of Artificial Sequence: Synthetic oligonucleotide

SEQ ID NO: 15776 - DNA, 8 bp, Artificial Sequence
  Description of Artificial Sequence: Synthetic oligonucleotide
tgatggtg

SEQ ID NO: 15777 - DNA, 181 bp, Artificial Sequence; identical to SEQ ID NO: 13416
  Description of Artificial Sequence: Synthetic polynucleotide

SEQ ID NO: 15778 - DNA, 369 bp, Artificial Sequence; identical to SEQ ID NO: 13427
  Description of Artificial Sequence: Synthetic polynucleotide

SEQ ID NO: 15779 - DNA, 2 bp, Artificial Sequence
  Description of Artificial Sequence: Synthetic oligonucleotide
tg

SEQ ID NO: 15780 - DNA, 35 bp, Artificial Sequence; identical to SEQ ID NO: 13449
  Description of Artificial Sequence: Synthetic oligonucleotide

SEQ ID NO: 15781 - DNA, 487 bp, Artificial Sequence; identical to SEQ ID NO: 13460
  Description of Artificial Sequence: Synthetic polynucleotide

SEQ ID NO: 15782 - DNA, 28 bp, Artificial Sequence
  Description of Artificial Sequence: Synthetic oligonucleotide
tgttttgattttttgattttgtgatttg

SEQ ID NO: 15783 - DNA, 2 bp, Artificial Sequence
  Description of Artificial Sequence: Synthetic oligonucleotide
tg

SEQ ID NO: 15784 - DNA, 18 bp, Artificial Sequence
  Description of Artificial Sequence: Synthetic oligonucleotide
tgtgtttttttgattgtg

SEQ ID NO: 15785 - DNA, 18 bp, Artificial Sequence
  Description of Artificial Sequence: Synthetic oligonucleotide
tgtaggttagtgagtgtg

SEQ ID NO: 15786 - DNA, 87 bp, Artificial Sequence; identical to SEQ ID NO: 13505
  Description of Artificial Sequence: Synthetic oligonucleotide

SEQ ID NO: 15787 - DNA, 11 bp, Artificial Sequence
  Description of Artificial Sequence: Synthetic oligonucleotide
tggagtttgtg

SEQ ID NO: 15788 - DNA, 2 bp, Artificial Sequence
  Description of Artificial Sequence: Synthetic oligonucleotide
tg

SEQ ID NO: 15789 - DNA, 167 bp, Artificial Sequence; identical to SEQ ID NO: 13536
  Description of Artificial Sequence: Synthetic polynucleotide

SEQ ID NO: 15790 - DNA, 2 bp, Artificial Sequence
  Description of Artificial Sequence: Synthetic oligonucleotide
tg

SEQ ID NO: 15791 - DNA, 2 bp, Artificial Sequence
  Description of Artificial Sequence: Synthetic oligonucleotide
tg

SEQ ID NO: 15792 - DNA, 2 bp, Artificial Sequence
  Description of Artificial Sequence: Synthetic oligonucleotide
tg

SEQ ID NO: 15793 - DNA, 185 bp, Artificial Sequence; identical to SEQ ID NO: 13540
  Description of Artificial Sequence: Synthetic polynucleotide

SEQ ID NO: 15794 - DNA, 17 bp, Artificial Sequence
  Description of Artificial Sequence: Synthetic oligonucleotide
tgagttgaagtagggtg

SEQ ID NO: 15795 - DNA, 135 bp, Artificial Sequence; identical to SEQ ID NO: 13542
  Description of Artificial Sequence: Synthetic polynucleotide

SEQ ID NO: 15796 - DNA, 2 bp, Artificial Sequence
  Description of Artificial Sequence: Synthetic oligonucleotide
tg

SEQ ID NO: 15797 - DNA, 71 bp, Artificial Sequence; identical to SEQ ID NO: 13544
  Description of Artificial Sequence: Synthetic oligonucleotide

SEQ ID NO: 15798 - DNA, 54 bp, Artificial Sequence; identical to SEQ ID NO: 13545
  Description of Artificial Sequence: Synthetic oligonucleotide

SEQ ID NO: 15799 - DNA, 5 bp, Artificial Sequence
  Description of Artificial Sequence: Synthetic oligonucleotide
tggtg

SEQ ID NO: 15800 - DNA, 29 bp, Artificial Sequence
  Description of Artificial Sequence: Synthetic oligonucleotide
tgttggtttttaagtttgtaggaaaagtg

SEQ ID NO: 15801 - DNA, 18 bp, Artificial Sequence
  Description of Artificial Sequence: Synthetic oligonucleotide
tgttttttagtgtttgtg

SEQ ID NO: 15802 - DNA, 2 bp, Artificial Sequence
  Description of Artificial Sequence: Synthetic oligonucleotide
tg

SEQ ID NO: 15803 - DNA, 5 bp, Artificial Sequence
  Description of Artificial Sequence: Synthetic oligonucleotide
tgatg

SEQ ID NO: 15804 - DNA, 24 bp, Artificial Sequence
  Description of Artificial Sequence: Synthetic oligonucleotide
tgaagtgttttttgtgtagatttg

SEQ ID NO: 15805 - DNA, 2 bp, Artificial Sequence
  Description of Artificial Sequence: Synthetic oligonucleotide
tg

SEQ ID NO: 15806 - DNA, 4 bp, Artificial Sequence
  Description of Artificial Sequence: Synthetic oligonucleotide
tgtg

SEQ ID NO: 15807 - DNA, 2 bp, Artificial Sequence
  Description of Artificial Sequence: Synthetic oligonucleotide
tg

SEQ ID NO: 15808 - DNA, 12 bp, Artificial Sequence
  Description of Artificial Sequence: Synthetic oligonucleotide
tggggtaggttg

SEQ ID NO: 15809 - DNA, 2 bp, Artificial Sequence
  Description of Artificial Sequence: Synthetic oligonucleotide
tg

SEQ ID NO: 15810 - DNA, 80 bp, Artificial Sequence; identical to SEQ ID NO: 13586
  Description of Artificial Sequence: Synthetic oligonucleotide

SEQ ID NO: 15811 - DNA, 4 bp, Artificial Sequence
  Description of Artificial Sequence: Synthetic oligonucleotide
tgtg

SEQ ID NO: 15812 - DNA, 3039 bp, Artificial Sequence; identical to SEQ ID NO: 13608
  Description of Artificial Sequence: Synthetic polynucleotide

SEQ ID NO: 15813 - DNA, 2 bp, Artificial Sequence
  Description of Artificial Sequence: Synthetic oligonucleotide
yg

SEQ ID NO: 15814 - DNA, 9 bp, Artificial Sequence
  Description of Artificial Sequence: Synthetic oligonucleotide
ygttattyg

SEQ ID NO: 15815 - DNA, 36 bp, Artificial Sequence; identical to SEQ ID NO: 13631
  Description of Artificial Sequence: Synthetic oligonucleotide

SEQ ID NO: 15816 - DNA, 8 bp, Artificial Sequence
  Description of Artificial Sequence: Synthetic oligonucleotide
ygtygtyg

SEQ ID NO: 15817 - DNA, 181 bp, Artificial Sequence; identical to SEQ ID NO: 13653
  Description of Artificial Sequence: Synthetic polynucleotide

SEQ ID NO: 15818 - DNA, 369 bp, Artificial Sequence; identical to SEQ ID NO: 13664
  Description of Artificial Sequence: Synthetic polynucleotide

SEQ ID NO: 15819 - DNA, 2 bp, Artificial Sequence
  Description of Artificial Sequence: Synthetic oligonucleotide
yg

SEQ ID NO: 15820 - DNA, 35 bp, Artificial Sequence; identical to SEQ ID NO: 13686
  Description of Artificial Sequence: Synthetic oligonucleotide

SEQ ID NO: 15821 - DNA, 487 bp, Artificial Sequence; identical to SEQ ID NO: 13697
  Description of Artificial Sequence: Synthetic polynucleotide

SEQ ID NO: 15822 - DNA, 28 bp, Artificial Sequence
  Description of Artificial Sequence: Synthetic oligonucleotide
yggattaygaggttaggagattaagayg

SEQ ID NO: 15823 - DNA, 2 bp, Artificial Sequence
  Description of Artificial Sequence: Synthetic oligonucleotide
yg

SEQ ID NO: 15824 - DNA, 18 bp, Artificial Sequence
  Description of Artificial Sequence: Synthetic oligonucleotide
ygyggttaggaaggygyg

SEQ ID NO: 15825 - DNA, 18 bp, Artificial Sequence
  Description of Artificial Sequence: Synthetic oligonucleotide
ygtatttattgatttgyg

SEQ ID NO: 15826 - DNA, 87 bp, Artificial Sequence; identical to SEQ ID NO: 13742
  Description of Artificial Sequence: Synthetic oligonucleotide

SEQ ID NO: 15827 - DNA, 11 bp, Artificial Sequence
  Description of Artificial Sequence: Synthetic oligonucleotide
ygtaagtttyg

SEQ ID NO: 15828 - DNA, 2 bp, Artificial Sequence
  Description of Artificial Sequence: Synthetic oligonucleotide
yg

SEQ ID NO: 15829 - DNA, 167 bp, Artificial Sequence; identical to SEQ ID NO: 13773
  Description of Artificial Sequence: Synthetic polynucleotide

SEQ ID NO: 15830 - DNA, 2 bp, Artificial Sequence
  Description of Artificial Sequence: Synthetic oligonucleotide
yg

SEQ ID NO: 15831 - DNA, 2 bp, Artificial Sequence
  Description of Artificial Sequence: Synthetic oligonucleotide
yg

SEQ ID NO: 15832 - DNA, 2 bp, Artificial Sequence
  Description of Artificial Sequence: Synthetic oligonucleotide
yg

SEQ ID NO: 15833 - DNA, 185 bp, Artificial Sequence; identical to SEQ ID NO: 13777
  Description of Artificial Sequence: Synthetic polynucleotide

SEQ ID NO: 15834 - DNA, 17 bp, Artificial Sequence
  Description of Artificial Sequence: Synthetic oligonucleotide
ygttttgtttyggttyg

SEQ ID NO: 15835 - DNA, 135 bp, Artificial Sequence; identical to SEQ ID NO: 13779
  Description of Artificial Sequence: Synthetic polynucleotide

SEQ ID NO: 15836 - DNA, 2 bp, Artificial Sequence
  Description of Artificial Sequence: Synthetic oligonucleotide
yg

SEQ ID NO: 15837 - DNA, 71 bp, Artificial Sequence; identical to SEQ ID NO: 13781
  Description of Artificial Sequence: Synthetic oligonucleotide

SEQ ID NO: 15838 - DNA, 54 bp, Artificial Sequence; identical to SEQ ID NO: 13782
  Description of Artificial Sequence: Synthetic oligonucleotide

SEQ ID NO: 15839 - DNA, 5 bp, Artificial Sequence
  Description of Artificial Sequence: Synthetic oligonucleotide
ygtyg

SEQ ID NO: 15840 - DNA, 29 bp, Artificial Sequence
  Description of Artificial Sequence: Synthetic oligonucleotide
ygttttttttaygggtttaaaaatyggyg

SEQ ID NO: 15841 - DNA, 18 bp, Artificial Sequence
  Description of Artificial Sequence: Synthetic oligonucleotide
ygtagatattagaaagyg

SEQ ID NO: 15842 - DNA, 2 bp, Artificial Sequence
  Description of Artificial Sequence: Synthetic oligonucleotide
yg

SEQ ID NO: 15843 - DNA, 5 bp, Artificial Sequence
  Description of Artificial Sequence: Synthetic oligonucleotide
ygtyg

SEQ ID NO: 15844 - DNA, 24 bp, Artificial Sequence
  Description of Artificial Sequence: Synthetic oligonucleotide
ygagtttgygtaggaggygtttyg

SEQ ID NO: 15845 - DNA, 2 bp, Artificial Sequence
  Description of Artificial Sequence: Synthetic oligonucleotide
yg

SEQ ID NO: 15846 - DNA, 4 bp, Artificial Sequence
  Description of Artificial Sequence: Synthetic oligonucleotide
ygyg

SEQ ID NO: 15847 - DNA, 2 bp, Artificial Sequence
  Description of Artificial Sequence: Synthetic oligonucleotide
yg

SEQ ID NO: 15848 - DNA, 12 bp, Artificial Sequence
  Description of Artificial Sequence: Synthetic oligonucleotide
ygatttgtttyg

SEQ ID NO: 15849 - DNA, 2 bp, Artificial Sequence
  Description of Artificial Sequence: Synthetic oligonucleotide
yg

SEQ ID NO: 15850 - DNA, 80 bp, Artificial Sequence; identical to SEQ ID NO: 13823
  Description of Artificial Sequence: Synthetic oligonucleotide

SEQ ID NO: 15851 - DNA, 4 bp, Artificial Sequence
  Description of Artificial Sequence: Synthetic oligonucleotide
ygyg

SEQ ID NO: 15852 - DNA, 3039 bp, Artificial Sequence; identical to SEQ ID NO: 13845
  Description of Artificial Sequence: Synthetic polynucleotide

SEQ ID NO: 15853 - DNA, 2 bp, Artificial Sequence
  Description of Artificial Sequence: Synthetic oligonucleotide
tg

SEQ ID NO: 15854 - DNA, 9 bp, Artificial Sequence
  Description of Artificial Sequence: Synthetic oligonucleotide
tgttatttg

SEQ ID NO: 15855 - DNA, 36 bp, Artificial Sequence; identical to SEQ ID NO: 13868
  Description of Artificial Sequence: Synthetic oligonucleotide

SEQ ID NO: 15856 - DNA, 8 bp, Artificial Sequence
  Description of Artificial Sequence: Synthetic oligonucleotide
tgttgttg

SEQ ID NO: 15857 - DNA, 181 bp, Artificial Sequence; identical to SEQ ID NO: 13890
  Description of Artificial Sequence: Synthetic polynucleotide

SEQ ID NO: 15858 - DNA, 369 bp, Artificial Sequence; identical to SEQ ID NO: 13901
  Description of Artificial Sequence: Synthetic polynucleotide

SEQ ID NO: 15859 - DNA, 2 bp, Artificial Sequence
  Description of Artificial Sequence: Synthetic oligonucleotide
tg

SEQ ID NO: 15860 - DNA, 35 bp, Artificial Sequence; identical to SEQ ID NO: 13923
  Description of Artificial Sequence: Synthetic oligonucleotide

SEQ ID NO: 15861 - DNA, 487 bp, Artificial Sequence; identical to SEQ ID NO: 13934
  Description of Artificial Sequence: Synthetic polynucleotide

SEQ ID NO: 15862 - DNA, 28 bp, Artificial Sequence
  Description of Artificial Sequence: Synthetic oligonucleotide
tggattatgaggttaggagattaagatg

SEQ ID NO: 15863 - DNA, 2 bp, Artificial Sequence
  Description of Artificial Sequence: Synthetic oligonucleotide
tg

SEQ ID NO: 15864 - DNA, 18 bp, Artificial Sequence
  Description of Artificial Sequence: Synthetic oligonucleotide
tgtggttaggaaggtgtg

SEQ ID NO: 15865 - DNA, 18 bp, Artificial Sequence
  Description of Artificial Sequence: Synthetic oligonucleotide
tgtatttattgatttgtg

SEQ ID NO: 15866 - DNA, 87 bp, Artificial Sequence; identical to SEQ ID NO: 13979
  Description of Artificial Sequence: Synthetic oligonucleotide

SEQ ID NO: 15867 - DNA, 11 bp, Artificial Sequence
  Description of Artificial Sequence: Synthetic oligonucleotide
tgtaagttttg

SEQ ID NO: 15868 - DNA, 2 bp, Artificial Sequence
  Description of Artificial Sequence: Synthetic oligonucleotide
tg

SEQ ID NO: 15869 - DNA, 167 bp, Artificial Sequence; identical to SEQ ID NO: 14010
  Description of Artificial Sequence: Synthetic polynucleotide

SEQ ID NO: 15870 - DNA, 2 bp, Artificial Sequence
  Description of Artificial Sequence: Synthetic oligonucleotide
tg

SEQ ID NO: 15871 - DNA, 2 bp, Artificial Sequence
  Description of Artificial Sequence: Synthetic oligonucleotide
tg

SEQ ID NO: 15872 - DNA, 2 bp, Artificial Sequence
  Description of Artificial Sequence: Synthetic oligonucleotide
tg

SEQ ID NO: 15873 - DNA, 185 bp, Artificial Sequence; identical to SEQ ID NO: 14014
  Description of Artificial Sequence: Synthetic polynucleotide

SEQ ID NO: 15874 - DNA, 17 bp, Artificial Sequence
  Description of Artificial Sequence: Synthetic oligonucleotide
tgttttgttttggtttg

SEQ ID NO: 15875 - DNA, 135 bp, Artificial Sequence; identical to SEQ ID NO: 14016
  Description of Artificial Sequence: Synthetic polynucleotide

SEQ ID NO: 15876 - DNA, 2 bp, Artificial Sequence
  Description of Artificial Sequence: Synthetic oligonucleotide
tg

SEQ ID NO: 15877 - DNA, 71 bp, Artificial Sequence; identical to SEQ ID NO: 14018
  Description of Artificial Sequence: Synthetic oligonucleotide

SEQ ID NO: 15878 - DNA, 54 bp, Artificial Sequence; identical to SEQ ID NO: 14019
  Description of Artificial Sequence: Synthetic oligonucleotide

SEQ ID NO: 15879 - DNA, 5 bp, Artificial Sequence
  Description of Artificial Sequence: Synthetic oligonucleotide
tgttg

SEQ ID NO: 15880 - DNA, 29 bp, Artificial Sequence
  Description of Artificial Sequence: Synthetic oligonucleotide
tgttttttttatgggtttaaaaattggtg

SEQ ID NO: 15881 - DNA, 18 bp, Artificial Sequence
  Description of Artificial Sequence: Synthetic oligonucleotide
tgtagatattagaaagtg

SEQ ID NO: 15882 - DNA, 2 bp, Artificial Sequence
  Description of Artificial Sequence: Synthetic oligonucleotide
tg

SEQ ID NO: 15883 - DNA, 5 bp, Artificial Sequence
  Description of Artificial Sequence: Synthetic oligonucleotide
tgttg

SEQ ID NO: 15884 - DNA, 24 bp, Artificial Sequence
  Description of Artificial Sequence: Synthetic oligonucleotide
tgagtttgtgtaggaggtgttttg

SEQ ID NO: 15885 - DNA, 2 bp, Artificial Sequence
  Description of Artificial Sequence: Synthetic oligonucleotide
tg

SEQ ID NO: 15886 - DNA, 4 bp, Artificial Sequence
  Description of Artificial Sequence: Synthetic oligonucleotide
tgtg

SEQ ID NO: 15887 - DNA, 2 bp, Artificial Sequence
  Description of Artificial Sequence: Synthetic oligonucleotide
tg

SEQ ID NO: 15888 - DNA, 12 bp, Artificial Sequence
  Description of Artificial Sequence: Synthetic oligonucleotide
tgatttgttttg

SEQ ID NO: 15889 - DNA, 2 bp, Artificial Sequence
  Description of Artificial Sequence: Synthetic oligonucleotide
tg

SEQ ID NO: 15890 - DNA, 80 bp, Artificial Sequence; identical to SEQ ID NO: 14060
  Description of Artificial Sequence: Synthetic oligonucleotide

SEQ ID NO: 15891 - DNA, 4 bp, Artificial Sequence
  Description of Artificial Sequence: Synthetic oligonucleotide
tgtg

SEQ ID NO: 15892 - DNA, 3039 bp, Artificial Sequence; identical to SEQ ID NO: 14082
  Description of Artificial Sequence: Synthetic polynucleotide

SEQ ID NO: 15893 - DNA, 201 bp, Homo sapiens; identical to SEQ ID NO: 14093

SEQ ID NO: 15894 - DNA, 208 bp, Homo sapiens; identical to SEQ ID NO: 14094

SEQ ID NO: 15895 - DNA, 235 bp, Homo sapiens; identical to SEQ ID NO: 14105

SEQ ID NO: 15896 - DNA, 207 bp, Homo sapiens; identical to SEQ ID NO: 14116

SEQ ID NO: 15897 - DNA, 380 bp, Homo sapiens; identical to SEQ ID NO: 14127

SEQ ID NO: 15898 - DNA, 568 bp, Homo sapiens; identical to SEQ ID NO: 14138

SEQ ID NO: 15899 - DNA, 201 bp, Homo sapiens; identical to SEQ ID NO: 14149

SEQ ID NO: 15900 - DNA, 234 bp, Homo sapiens; identical to SEQ ID NO: 14160

SEQ ID NO: 15901 - DNA, 686 bp, Homo sapiens; identical to SEQ ID NO: 14171

SEQ ID NO: 15902 - DNA, 227 bp, Homo sapiens; identical to SEQ ID NO: 14182

SEQ ID NO: 15903 - DNA, 201 bp, Homo sapiens; identical to SEQ ID NO: 14193

SEQ ID NO: 15904 - DNA, 217 bp, Homo sapiens; identical to SEQ ID NO: 14204

SEQ ID NO: 15905 - DNA, 217 bp, Homo sapiens; identical to SEQ ID NO: 14205

SEQ ID NO: 15906 - DNA, 286 bp, Homo sapiens; identical to SEQ ID NO: 14216

SEQ ID NO: 15907 - DNA, 210 bp, Homo sapiens; identical to SEQ ID NO: 14227

SEQ ID NO: 15908 - DNA, 201 bp, Homo sapiens; identical to SEQ ID NO: 14238

SEQ ID NO: 15909 - DNA, 366 bp, Homo sapiens; identical to SEQ ID NO: 14247

SEQ ID NO: 15910 - DNA, 201 bp, Homo sapiens; identical to SEQ ID NO: 14248

SEQ ID NO: 15911 - DNA, 201 bp, Homo sapiens; identical to SEQ ID NO: 14249

SEQ ID NO: 15912 - DNA, 201 bp, Homo sapiens; identical to SEQ ID NO: 14250

SEQ ID NO: 15913 - DNA, 384 bp, Homo sapiens; identical to SEQ ID NO: 14251

SEQ ID NO: 15914 - DNA, 216 bp, Homo sapiens; identical to SEQ ID NO: 14252

SEQ ID NO: 15915 - DNA, 334 bp, Homo sapiens; identical to SEQ ID NO: 14253

SEQ ID NO: 15916 - DNA, 201 bp, Homo sapiens; identical to SEQ ID NO: 14254

SEQ ID NO: 15917 - DNA, 270 bp, Homo sapiens; identical to SEQ ID NO: 14255

SEQ ID NO: 15918 - DNA, 253 bp, Homo sapiens; identical to SEQ ID NO: 14256

SEQ ID NO: 15919 - DNA, 204 bp, Homo sapiens; identical to SEQ ID NO: 14257

SEQ ID NO: 15920 - DNA, 228 bp, Homo sapiens; identical to SEQ ID NO: 14258

SEQ ID NO: 15921 - DNA, 217 bp, Homo sapiens; identical to SEQ ID NO: 14259

SEQ ID NO: 15922 - DNA, 201 bp, Homo sapiens; identical to SEQ ID NO: 14260

SEQ ID NO: 15923 - DNA, 204 bp, Homo sapiens; identical to SEQ ID NO: 14261

SEQ ID NO: 15924 - DNA, 223 bp, Homo sapiens; identical to SEQ ID NO: 14262

SEQ ID NO: 15925 - DNA, 201 bp, Homo sapiens; identical to SEQ ID NO: 14263

SEQ ID NO: 15926 - DNA, 203 bp, Homo sapiens; identical to SEQ ID NO: 14264

SEQ ID NO: 15927 - DNA, 201 bp, Homo sapiens; identical to SEQ ID NO: 14265

SEQ ID NO: 15928 - DNA, 211 bp, Homo sapiens; identical to SEQ ID NO: 14275

SEQ ID NO: 15929 - DNA, 201 bp, Homo sapiens; identical to SEQ ID NO: 14286

SEQ ID NO: 15930 - DNA, 279 bp, Homo sapiens; identical to SEQ ID NO: 14297

SEQ ID NO: 15931 - DNA, 203 bp, Homo sapiens; identical to SEQ ID NO: 14308

SEQ ID NO: 15932 - DNA, 3238 bp, Homo sapiens; identical to SEQ ID NO: 14319

SEQ ID NO: 15933 - DNA, 201 bp, Homo sapiens; identical to SEQ ID NO: 14330

SEQ ID NO: 15934 - DNA, 208 bp, Homo sapiens; identical to SEQ ID NO: 14331

SEQ ID NO: 15935 - DNA, 235 bp, Homo sapiens; identical to SEQ ID NO: 14342

SEQ ID NO: 15936 - DNA, 207 bp, Homo sapiens; identical to SEQ ID NO: 14353

SEQ ID NO: 15937 - DNA, 380 bp, Homo sapiens; identical to SEQ ID NO: 14364

SEQ ID NO: 15938 - DNA, 568 bp, Homo sapiens; identical to SEQ ID NO: 14375

SEQ ID NO: 15939 - DNA, 201 bp, Homo sapiens; identical to SEQ ID NO: 14386

SEQ ID NO: 15940 - DNA, 234 bp, Homo sapiens; identical to SEQ ID NO: 14397

SEQ ID NO: 15941 - DNA, 686 bp, Homo sapiens; identical to SEQ ID NO: 14408

SEQ ID NO: 15942 - DNA, 227 bp, Homo sapiens; identical to SEQ ID NO: 14419

SEQ ID NO: 15943 - DNA, 201 bp, Homo sapiens; identical to SEQ ID NO: 14430

SEQ ID NO: 15944 - DNA, 217 bp, Homo sapiens; identical to SEQ ID NO: 14441

SEQ ID NO: 15945 - DNA, 217 bp, Homo sapiens; identical to SEQ ID NO: 14442

SEQ ID NO: 15946 - DNA, 286 bp, Homo sapiens; identical to SEQ ID NO: 14453

SEQ ID NO: 15947 - DNA, 210 bp, Homo sapiens; identical to SEQ ID NO: 14464

SEQ ID NO: 15948 - DNA, 201 bp, Homo sapiens; identical to SEQ ID NO: 14475

SEQ ID NO: 15949 - DNA, 366 bp, Homo sapiens; identical to SEQ ID NO: 14484

SEQ ID NO: 15950 - DNA, 201 bp, Homo sapiens; identical to SEQ ID NO: 14485

SEQ ID NO: 15951 - DNA, 201 bp, Homo sapiens; identical to SEQ ID NO: 14486

SEQ ID NO: 15952 - DNA, 201 bp, Homo sapiens; identical to SEQ ID NO: 14487

SEQ ID NO: 15953 - DNA, 384 bp, Homo sapiens; identical to SEQ ID NO: 14488

SEQ ID NO: 15954 - DNA, 216 bp, Homo sapiens; identical to SEQ ID NO: 14489

SEQ ID NO: 15955 - DNA, 334 bp, Homo sapiens; identical to SEQ ID NO: 14490

SEQ ID NO: 15956 - DNA, 201 bp, Homo sapiens; identical to SEQ ID NO: 14491

SEQ ID NO: 15957 - DNA, 270 bp, Homo sapiens; identical to SEQ ID NO: 14492

SEQ ID NO: 15958 - DNA, 253 bp, Homo sapiens; identical to SEQ ID NO: 14493

SEQ ID NO: 15959 - DNA, 204 bp, Homo sapiens; identical to SEQ ID NO: 14494

SEQ ID NO: 15960 - DNA, 228 bp, Homo sapiens; identical to SEQ ID NO: 14495

SEQ ID NO: 15961 - DNA, 217 bp, Homo sapiens; identical to SEQ ID NO: 14496

SEQ ID NO: 15962 - DNA, 201 bp, Homo sapiens; identical to SEQ ID NO: 14497

SEQ ID NO: 15963 - DNA, 204 bp, Homo sapiens; identical to SEQ ID NO: 14498

SEQ ID NO: 15964 - DNA, 223 bp, Homo sapiens; identical to SEQ ID NO: 14499

SEQ ID NO: 15965 - DNA, 201 bp, Homo sapiens; identical to SEQ ID NO: 14500

SEQ ID NO: 15966 - DNA, 203 bp, Homo sapiens; identical to SEQ ID NO: 14501

SEQ ID NO: 15967 - DNA, 201 bp, Homo sapiens; identical to SEQ ID NO: 14502

SEQ ID NO: 15968 - DNA, 211 bp, Homo sapiens; identical to SEQ ID NO: 14512

SEQ ID NO: 15969 - DNA, 201 bp, Homo sapiens; identical to SEQ ID NO: 14523

SEQ ID NO: 15970 - DNA, 279 bp, Homo sapiens; identical to SEQ ID NO: 14534

SEQ ID NO: 15971 - DNA, 203 bp, Homo sapiens; identical to SEQ ID NO: 14545

SEQ ID NO: 15972 - DNA, 3238 bp, Homo sapiens; identical to SEQ ID NO: 14556

SEQ ID NO: 15973 - DNA, 201 bp, Artificial Sequence; identical to SEQ ID NO: 14567
  Description of Artificial Sequence: Synthetic polynucleotide

SEQ ID NO: 15974 - DNA, 208 bp, Artificial Sequence; identical to SEQ ID NO: 14568
  Description of Artificial Sequence: Synthetic polynucleotide

SEQ ID NO: 15975 - DNA, 235 bp, Artificial Sequence; identical to SEQ ID NO: 14579
  Description of Artificial Sequence: Synthetic polynucleotide

SEQ ID NO: 15976 - DNA, 207 bp, Artificial Sequence; identical to SEQ ID NO: 14590
  Description of Artificial Sequence: Synthetic polynucleotide

SEQ ID NO: 15977 - DNA, 380 bp, Artificial Sequence; identical to SEQ ID NO: 14601
  Description of Artificial Sequence: Synthetic polynucleotide

SEQ ID NO: 15978 - DNA, 568 bp, Artificial Sequence; identical to SEQ ID NO: 14612
  Description of Artificial Sequence: Synthetic polynucleotide

SEQ ID NO: 15979 - DNA, 201 bp, Artificial Sequence; identical to SEQ ID NO: 14623
  Description of Artificial Sequence: Synthetic polynucleotide

SEQ ID NO: 15980 - DNA, 234 bp, Artificial Sequence; identical to SEQ ID NO: 14634
  Description of Artificial Sequence: Synthetic polynucleotide

SEQ ID NO: 15981 - DNA, 686 bp, Artificial Sequence; identical to SEQ ID NO: 14645
  Description of Artificial Sequence: Synthetic polynucleotide

SEQ ID NO: 15982 - DNA, 227 bp, Artificial Sequence; identical to SEQ ID NO: 14656
  Description of Artificial Sequence: Synthetic polynucleotide

SEQ ID NO: 15983 - DNA, 201 bp, Artificial Sequence; identical to SEQ ID NO: 14667
  Description of Artificial Sequence: Synthetic polynucleotide

SEQ ID NO: 15984 - DNA, 217 bp, Artificial Sequence; identical to SEQ ID NO: 14678
  Description of Artificial Sequence: Synthetic polynucleotide

SEQ ID NO: 15985 - DNA, 217 bp, Artificial Sequence; identical to SEQ ID NO: 14679
  Description of Artificial Sequence: Synthetic polynucleotide

SEQ ID NO: 15986 - DNA, 286 bp, Artificial Sequence; identical to SEQ ID NO: 14690
  Description of Artificial Sequence: Synthetic polynucleotide

SEQ ID NO: 15987 - DNA, 210 bp, Artificial Sequence; identical to SEQ ID NO: 14701
  Description of Artificial Sequence: Synthetic polynucleotide

SEQ ID NO: 15988 - DNA, 201 bp, Artificial Sequence; identical to SEQ ID NO: 14712
  Description of Artificial Sequence: Synthetic polynucleotide

SEQ ID NO: 15989 - DNA, 366 bp, Artificial Sequence; identical to SEQ ID NO: 14721
  Description of Artificial Sequence: Synthetic polynucleotide

SEQ ID NO: 15990 - DNA, 201 bp, Artificial Sequence; identical to SEQ ID NO: 14722
  Description of Artificial Sequence: Synthetic polynucleotide

SEQ ID NO: 15991 - DNA, 201 bp, Artificial Sequence; identical to SEQ ID NO: 14723
  Description of Artificial Sequence: Synthetic polynucleotide

SEQ ID NO: 15992 - DNA, 201 bp, Artificial Sequence; identical to SEQ ID NO: 14724
  Description of Artificial Sequence: Synthetic polynucleotide

SEQ ID NO: 15993 - DNA, 384 bp, Artificial Sequence; identical to SEQ ID NO: 14725
  Description of Artificial Sequence: Synthetic polynucleotide

SEQ ID NO: 15994 - DNA, 216 bp, Artificial Sequence; identical to SEQ ID NO: 14726
  Description of Artificial Sequence: Synthetic polynucleotide

SEQ ID NO: 15995 - DNA, 334 bp, Artificial Sequence; identical to SEQ ID NO: 14727
  Description of Artificial Sequence: Synthetic polynucleotide

SEQ ID NO: 15996 - DNA, 201 bp, Artificial Sequence; identical to SEQ ID NO: 14728
  Description of Artificial Sequence: Synthetic polynucleotide

SEQ ID NO: 15997 - DNA, 270 bp, Artificial Sequence; identical to SEQ ID NO: 14729
  Description of Artificial Sequence: Synthetic polynucleotide

SEQ ID NO: 15998 - DNA, 253 bp, Artificial Sequence; identical to SEQ ID NO: 14730
  Description of Artificial Sequence: Synthetic polynucleotide

SEQ ID NO: 15999 - DNA, 204 bp, Artificial Sequence; identical to SEQ ID NO: 14731
  Description of Artificial Sequence: Synthetic polynucleotide

SEQ ID NO: 16000 - DNA, 228 bp, Artificial Sequence; identical to SEQ ID NO: 14732
  Description of Artificial Sequence: Synthetic polynucleotide

SEQ ID NO: 16001 - DNA, 217 bp, Artificial Sequence; identical to SEQ ID NO: 14733
  Description of Artificial Sequence: Synthetic polynucleotide

SEQ ID NO: 16002 - DNA, 201 bp, Artificial Sequence; identical to SEQ ID NO: 14734
  Description of Artificial Sequence: Synthetic polynucleotide

SEQ ID NO: 16003 - DNA, 204 bp, Artificial Sequence; identical to SEQ ID NO: 14735
  Description of Artificial Sequence: Synthetic polynucleotide

SEQ ID NO: 16004 - DNA, 223 bp, Artificial Sequence; identical to SEQ ID NO: 14736
  Description of Artificial Sequence: Synthetic polynucleotide

SEQ ID NO: 16005 - DNA, 201 bp, Artificial Sequence; identical to SEQ ID NO: 14737
  Description of Artificial Sequence: Synthetic polynucleotide

SEQ ID NO: 16006 - DNA, 203 bp, Artificial Sequence; identical to SEQ ID NO: 14738
  Description of Artificial Sequence: Synthetic polynucleotide

SEQ ID NO: 16007 - DNA, 201 bp, Artificial Sequence; identical to SEQ ID NO: 14739
  Description of Artificial Sequence: Synthetic polynucleotide

SEQ ID NO: 16008 - DNA, 211 bp, Artificial Sequence; identical to SEQ ID NO: 14749
  Description of Artificial Sequence: Synthetic polynucleotide

SEQ ID NO: 16009 - DNA, 201 bp, Artificial Sequence; identical to SEQ ID NO: 14760
  Description of Artificial Sequence: Synthetic polynucleotide

SEQ ID NO: 16010 - DNA, 279 bp, Artificial Sequence; identical to SEQ ID NO: 14771
  Description of Artificial Sequence: Synthetic polynucleotide

SEQ ID NO: 16011 - DNA, 203 bp, Artificial Sequence; identical to SEQ ID NO: 14782
  Description of Artificial Sequence: Synthetic polynucleotide

SEQ ID NO: 16012 - DNA, 3238 bp, Artificial Sequence; identical to SEQ ID NO: 14793
  Description of Artificial Sequence: Synthetic polynucleotide

SEQ ID NO: 16013 - DNA, 201 bp, Artificial Sequence; identical to SEQ ID NO: 14804
  Description of Artificial Sequence: Synthetic polynucleotide

SEQ ID NO: 16014 - DNA, 208 bp, Artificial Sequence; identical to SEQ ID NO: 14805
  Description of Artificial Sequence: Synthetic polynucleotide

SEQ ID NO: 16015 - DNA, 235 bp, Artificial Sequence; identical to SEQ ID NO: 14816
  Description of Artificial Sequence: Synthetic polynucleotide

SEQ ID NO: 16016 - DNA, 207 bp, Artificial Sequence; identical to SEQ ID NO: 14827
  Description of Artificial Sequence: Synthetic polynucleotide

SEQ ID NO: 16017 - DNA, 380 bp, Artificial Sequence; identical to SEQ ID NO: 14838
  Description of Artificial Sequence: Synthetic polynucleotide

SEQ ID NO: 16018 - DNA, 568 bp, Artificial Sequence; identical to SEQ ID NO: 14849
  Description of Artificial Sequence: Synthetic polynucleotide

SEQ ID NO: 16019 - DNA, 201 bp, Artificial Sequence; identical to SEQ ID NO: 14860
  Description of Artificial Sequence: Synthetic polynucleotide

SEQ ID NO: 16020 - DNA, 234 bp, Artificial Sequence; identical to SEQ ID NO: 14871
  Description of Artificial Sequence: Synthetic polynucleotide

SEQ ID NO: 16021 - DNA, 686 bp, Artificial Sequence; identical to SEQ ID NO: 14882
  Description of Artificial Sequence: Synthetic polynucleotide

SEQ ID NO: 16022 - DNA, 227 bp, Artificial Sequence; identical to SEQ ID NO: 14893
  Description of Artificial Sequence: Synthetic polynucleotide

SEQ ID NO: 16023 - DNA, 201 bp, Artificial Sequence; identical to SEQ ID NO: 14904
  Description of Artificial Sequence: Synthetic polynucleotide

SEQ ID NO: 16024 - DNA, 217 bp, Artificial Sequence; identical to SEQ ID NO: 14915
  Description of Artificial Sequence: Synthetic polynucleotide

SEQ ID NO: 16025 - DNA, 217 bp, Artificial Sequence; identical to SEQ ID NO: 14916
  Description of Artificial Sequence: Synthetic polynucleotide

SEQ ID NO: 16026 - DNA, 286 bp, Artificial Sequence; identical to SEQ ID NO: 14927
  Description of Artificial Sequence: Synthetic polynucleotide

SEQ ID NO: 16027 - DNA, 210 bp, Artificial Sequence; identical to SEQ ID NO: 14938
  Description of Artificial Sequence: Synthetic polynucleotide

SEQ ID NO: 16028 - DNA, 201 bp, Artificial Sequence; identical to SEQ ID NO: 14949
  Description of Artificial Sequence: Synthetic polynucleotide

SEQ ID NO: 16029 - DNA, 366 bp, Artificial Sequence; identical to SEQ ID NO: 14958
  Description of Artificial Sequence: Synthetic polynucleotide

SEQ ID NO: 16030 - DNA, 201 bp, Artificial Sequence; identical to SEQ ID NO: 14959
  Description of Artificial Sequence: Synthetic polynucleotide

SEQ ID NO: 16031 - DNA, 201 bp, Artificial Sequence; identical to SEQ ID NO: 14960
  Description of Artificial Sequence: Synthetic polynucleotide

SEQ ID NO: 16032 - DNA, 201 bp, Artificial Sequence; identical to SEQ ID NO: 14961
  Description of Artificial Sequence: Synthetic polynucleotide

SEQ ID NO: 16033 - DNA, 384 bp, Artificial Sequence; identical to SEQ ID NO: 14962
  Description of Artificial Sequence: Synthetic polynucleotide

SEQ ID NO: 16034 - DNA, 216 bp, Artificial Sequence; identical to SEQ ID NO: 14963
  Description of Artificial Sequence: Synthetic polynucleotide

SEQ ID NO: 16035 - DNA, 334 bp, Artificial Sequence; identical to SEQ ID NO: 14964
  Description of Artificial Sequence: Synthetic polynucleotide

SEQ ID NO: 16036 - DNA, 201 bp, Artificial Sequence; identical to SEQ ID NO: 14965
  Description of Artificial Sequence: Synthetic polynucleotide

SEQ ID NO: 16037 - DNA, 270 bp, Artificial Sequence; identical to SEQ ID NO: 14966
  Description of Artificial Sequence: Synthetic polynucleotide

SEQ ID NO: 16038 - DNA, 253 bp, Artificial Sequence; identical to SEQ ID NO: 14967
  Description of Artificial Sequence: Synthetic polynucleotide

SEQ ID NO: 16039 - DNA, 204 bp, Artificial Sequence; identical to SEQ ID NO: 14968
  Description of Artificial Sequence: Synthetic polynucleotide

SEQ ID NO: 16040 - DNA, 228 bp, Artificial Sequence; identical to SEQ ID NO: 14969
  Description of Artificial Sequence: Synthetic polynucleotide

SEQ ID NO: 16041 - DNA, 217 bp, Artificial Sequence; identical to SEQ ID NO: 14970
  Description of Artificial Sequence: Synthetic polynucleotide

SEQ ID NO: 16042 - DNA, 201 bp, Artificial Sequence; identical to SEQ ID NO: 14971
  Description of Artificial Sequence: Synthetic polynucleotide

SEQ ID NO: 16043 - DNA, 204 bp, Artificial Sequence; identical to SEQ ID NO: 14972
  Description of Artificial Sequence: Synthetic polynucleotide

SEQ ID NO: 16044 - DNA, 223 bp, Artificial Sequence; identical to SEQ ID NO: 14973
  Description of Artificial Sequence: Synthetic polynucleotide

SEQ ID NO: 16045 - DNA, 201 bp, Artificial Sequence; identical to SEQ ID NO: 14974
  Description of Artificial Sequence: Synthetic polynucleotide

SEQ ID NO: 16046 - DNA, 203 bp, Artificial Sequence; identical to SEQ ID NO: 14975
  Description of Artificial Sequence: Synthetic polynucleotide

SEQ ID NO: 16047 - DNA, 201 bp, Artificial Sequence; identical to SEQ ID NO: 14976
  Description of Artificial Sequence: Synthetic polynucleotide

SEQ ID NO: 16048 - DNA, 211 bp, Artificial Sequence; identical to SEQ ID NO: 14986
  Description of Artificial Sequence: Synthetic polynucleotide

SEQ ID NO: 16049 - DNA, 201 bp, Artificial Sequence; identical to SEQ ID NO: 14997
  Description of Artificial Sequence: Synthetic polynucleotide

SEQ ID NO: 16050 - DNA, 279 bp, Artificial Sequence; identical to SEQ ID NO: 15008
  Description of Artificial Sequence: Synthetic polynucleotide

SEQ ID NO: 16051 - DNA, 203 bp, Artificial Sequence; identical to SEQ ID NO: 15019
  Description of Artificial Sequence: Synthetic polynucleotide

SEQ ID NO: 16052 - DNA, 3238 bp, Artificial Sequence; identical to SEQ ID NO: 15030
  Description of Artificial Sequence: Synthetic polynucleotide

SEQ ID NO: 16053 - DNA, 201 bp, Artificial Sequence; identical to SEQ ID NO: 15041
  Description of Artificial Sequence: Synthetic polynucleotide

SEQ ID NO: 16054 - DNA, 208 bp, Artificial Sequence; identical to SEQ ID NO: 15042
  Description of Artificial Sequence: Synthetic polynucleotide

SEQ ID NO: 16055 - DNA, 235 bp, Artificial Sequence; identical to SEQ ID NO: 15053
  Description of Artificial Sequence: Synthetic polynucleotide

SEQ ID NO: 16056 - DNA, 207 bp, Artificial Sequence; identical to SEQ ID NO: 15064
  Description of Artificial Sequence: Synthetic polynucleotide

SEQ ID NO: 16057 - DNA, 380 bp, Artificial Sequence; identical to SEQ ID NO: 15075
  Description of Artificial Sequence: Synthetic polynucleotide

SEQ ID NO: 16058 - DNA, 568 bp, Artificial Sequence; identical to SEQ ID NO: 15086
  Description of Artificial Sequence: Synthetic polynucleotide

SEQ ID NO: 16059 - DNA, 201 bp, Artificial Sequence; identical to SEQ ID NO: 15097
  Description of Artificial Sequence: Synthetic polynucleotide

SEQ ID NO: 16060 - DNA, 234 bp, Artificial Sequence; identical to SEQ ID NO: 15108
  Description of Artificial Sequence: Synthetic polynucleotide

SEQ ID NO: 16061 - DNA, 686 bp, Artificial Sequence; identical to SEQ ID NO: 15119
  Description of Artificial Sequence: Synthetic polynucleotide

SEQ ID NO: 16062 - DNA, 227 bp, Artificial Sequence; identical to SEQ ID NO: 15130
  Description of Artificial Sequence: Synthetic polynucleotide

SEQ ID NO: 16063 - DNA, 201 bp, Artificial Sequence; identical to SEQ ID NO: 15141
  Description of Artificial Sequence: Synthetic polynucleotide

SEQ ID NO: 16064 - DNA, 217 bp, Artificial Sequence; identical to SEQ ID NO: 15152
  Description of Artificial Sequence: Synthetic polynucleotide

SEQ ID NO: 16065 - DNA, 217 bp, Artificial Sequence; identical to SEQ ID NO: 15153
  Description of Artificial Sequence: Synthetic polynucleotide

SEQ ID NO: 16066 - DNA, 286 bp, Artificial Sequence; identical to SEQ ID NO: 15164
  Description of Artificial Sequence: Synthetic polynucleotide

SEQ ID NO: 16067 - DNA, 210 bp, Artificial Sequence; identical to SEQ ID NO: 15175
  Description of Artificial Sequence: Synthetic polynucleotide

SEQ ID NO: 16068 - DNA, 201 bp, Artificial Sequence; identical to SEQ ID NO: 15186
  Description of Artificial Sequence: Synthetic polynucleotide

SEQ ID NO: 16069 - DNA, 366 bp, Artificial Sequence; identical to SEQ ID NO: 15195
  Description of Artificial Sequence: Synthetic polynucleotide

SEQ ID NO: 16070 - DNA, 201 bp, Artificial Sequence; identical to SEQ ID NO: 15196
  Description of Artificial Sequence: Synthetic polynucleotide

SEQ ID NO: 16071 - DNA, 201 bp, Artificial Sequence; identical to SEQ ID NO: 15197
  Description of Artificial Sequence: Synthetic polynucleotide

SEQ ID NO: 16072 - DNA, 201 bp, Artificial Sequence; identical to SEQ ID NO: 15198
  Description of Artificial Sequence: Synthetic polynucleotide

SEQ ID NO: 16073 - DNA, 384 bp, Artificial Sequence; identical to SEQ ID NO: 15199
  Description of Artificial Sequence: Synthetic polynucleotide

SEQ ID NO: 16074 - DNA, 216 bp, Artificial Sequence; identical to SEQ ID NO: 15200
  Description of Artificial Sequence: Synthetic polynucleotide

SEQ ID NO: 16075 - DNA, 334 bp, Artificial Sequence; identical to SEQ ID NO: 15201
  Description of Artificial Sequence: Synthetic polynucleotide

SEQ ID NO: 16076 - DNA, 201 bp, Artificial Sequence; identical to SEQ ID NO: 15202
  Description of Artificial Sequence: Synthetic polynucleotide

SEQ ID NO: 16077 - DNA, 270 bp, Artificial Sequence; identical to SEQ ID NO: 15203
  Description of Artificial Sequence: Synthetic polynucleotide

SEQ ID NO: 16078 - DNA, 253 bp, Artificial Sequence; identical to SEQ ID NO: 15204
  Description of Artificial Sequence: Synthetic polynucleotide

SEQ ID NO: 16079 - DNA, 204 bp, Artificial Sequence; identical to SEQ ID NO: 15205
  Description of Artificial Sequence: Synthetic polynucleotide

SEQ ID NO: 16080 - DNA, 228 bp, Artificial Sequence; identical to SEQ ID NO: 15206
  Description of Artificial Sequence: Synthetic polynucleotide

SEQ ID NO: 16081 - DNA, 217 bp, Artificial Sequence; identical to SEQ ID NO: 15207
  Description of Artificial Sequence: Synthetic polynucleotide

SEQ ID NO: 16082 - DNA, 201 bp, Artificial Sequence; identical to SEQ ID NO: 15208
  Description of Artificial Sequence: Synthetic polynucleotide

SEQ ID NO: 16083 - DNA, 204 bp, Artificial Sequence; identical to SEQ ID NO: 15209
  Description of Artificial Sequence: Synthetic polynucleotide

SEQ ID NO: 16084 - DNA, 223 bp, Artificial Sequence; identical to SEQ ID NO: 15210
  Description of Artificial Sequence: Synthetic polynucleotide

SEQ ID NO: 16085 - DNA, 201 bp, Artificial Sequence; identical to SEQ ID NO: 15211
  Description of Artificial Sequence: Synthetic polynucleotide

SEQ ID NO: 16086 - DNA, 203 bp, Artificial Sequence; identical to SEQ ID NO: 15212
  Description of Artificial Sequence: Synthetic polynucleotide

SEQ ID NO: 16087 - DNA, 201 bp, Artificial Sequence; identical to SEQ ID NO: 15213
  Description of Artificial Sequence: Synthetic polynucleotide

SEQ ID NO: 16088 - DNA, 211 bp, Artificial Sequence; identical to SEQ ID NO: 15223
  Description of Artificial Sequence: Synthetic polynucleotide

SEQ ID NO: 16089 - DNA, 201 bp, Artificial Sequence; identical to SEQ ID NO: 15234
  Description of Artificial Sequence: Synthetic polynucleotide

SEQ ID NO: 16090 - DNA, 279 bp, Artificial Sequence; identical to SEQ ID NO: 15245
  Description of Artificial Sequence: Synthetic polynucleotide

SEQ ID NO: 16091 - DNA, 203 bp, Artificial Sequence; identical to SEQ ID NO: 15256
  Description of Artificial Sequence: Synthetic polynucleotide

SEQ ID NO: 16092 - DNA, 3238 bp, Artificial Sequence; identical to SEQ ID NO: 15267
  Description of Artificial Sequence: Synthetic polynucleotide

SEQ ID NO: 16093 - DNA, 201 bp, Artificial Sequence; identical to SEQ ID NO: 15278
  Description of Artificial Sequence: Synthetic polynucleotide

SEQ ID NO: 16094 - DNA, 208 bp, Artificial Sequence; identical to SEQ ID NO: 15279
  Description of Artificial Sequence: Synthetic polynucleotide

SEQ ID NO: 16095 - DNA, 235 bp, Artificial Sequence; identical to SEQ ID NO: 15290
  Description of Artificial Sequence: Synthetic polynucleotide

SEQ ID NO: 16096 - DNA, 207 bp, Artificial Sequence; identical to SEQ ID NO: 15301
  Description of Artificial Sequence: Synthetic polynucleotide

SEQ ID NO: 16097 - DNA, 380 bp, Artificial Sequence; identical to SEQ ID NO: 15312
  Description of Artificial Sequence: Synthetic polynucleotide

SEQ ID NO: 16098 - DNA, 568 bp, Artificial Sequence; identical to SEQ ID NO: 15323
  Description of Artificial Sequence: Synthetic polynucleotide

SEQ ID NO: 16099 - DNA, 201 bp, Artificial Sequence; identical to SEQ ID NO: 15334
  Description of Artificial Sequence: Synthetic polynucleotide

SEQ ID NO: 16100 - DNA, 234 bp, Artificial Sequence; identical to SEQ ID NO: 15345
  Description of Artificial Sequence: Synthetic polynucleotide

SEQ ID NO: 16101 - DNA, 686 bp, Artificial Sequence; identical to SEQ ID NO: 15356
  Description of Artificial Sequence: Synthetic polynucleotide

SEQ ID NO: 16102 - DNA, 227 bp, Artificial Sequence; identical to SEQ ID NO: 15367
  Description of Artificial Sequence: Synthetic polynucleotide

SEQ ID NO: 16103 - DNA, 201 bp, Artificial Sequence; identical to SEQ ID NO: 15378
  Description of Artificial Sequence: Synthetic polynucleotide

SEQ ID NO: 16104 - DNA, 217 bp, Artificial Sequence; identical to SEQ ID NO: 15389
  Description of Artificial Sequence: Synthetic polynucleotide

SEQ ID NO: 16105 - DNA, 217 bp, Artificial Sequence; identical to SEQ ID NO: 15390
  Description of Artificial Sequence: Synthetic polynucleotide

SEQ ID NO: 16106 - DNA, 286 bp, Artificial Sequence; identical to SEQ ID NO: 15401
  Description of Artificial Sequence: Synthetic polynucleotide

SEQ ID NO: 16107 - DNA, 210 bp, Artificial Sequence; identical to SEQ ID NO: 15412
  Description of Artificial Sequence: Synthetic polynucleotide

SEQ ID NO: 16108 - DNA, 201 bp, Artificial Sequence; identical to SEQ ID NO: 15423
  Description of Artificial Sequence: Synthetic polynucleotide

SEQ ID NO: 16109 - DNA, 366 bp, Artificial Sequence; identical to SEQ ID NO: 15432
  Description of Artificial Sequence: Synthetic polynucleotide

SEQ ID NO: 16110 - DNA, 201 bp, Artificial Sequence; identical to SEQ ID NO: 15433
  Description of Artificial Sequence: Synthetic polynucleotide

SEQ ID NO: 16111 - DNA, 201 bp, Artificial Sequence; identical to SEQ ID NO: 15434
  Description of Artificial Sequence: Synthetic polynucleotide

SEQ ID NO: 16112 - DNA, 201 bp, Artificial Sequence; identical to SEQ ID NO: 15435
  Description of Artificial Sequence: Synthetic polynucleotide

SEQ ID NO: 16113 - DNA, 384 bp, Artificial Sequence; identical to SEQ ID NO: 15436
  Description of Artificial Sequence: Synthetic polynucleotide

SEQ ID NO: 16114 - DNA, 216 bp, Artificial Sequence; identical to SEQ ID NO: 15437
  Description of Artificial Sequence: Synthetic polynucleotide

SEQ ID NO: 16115 - DNA, 334 bp, Artificial Sequence; identical to SEQ ID NO: 15438
  Description of Artificial Sequence: Synthetic polynucleotide

SEQ ID NO: 16116 - DNA, 201 bp, Artificial Sequence; identical to SEQ ID NO: 15439
  Description of Artificial Sequence: Synthetic polynucleotide

SEQ ID NO: 16117 - DNA, 270 bp, Artificial Sequence; identical to SEQ ID NO: 15440
  Description of Artificial Sequence: Synthetic polynucleotide

SEQ ID NO: 16118 - DNA, 253 bp, Artificial Sequence; identical to SEQ ID NO: 15441
  Description of Artificial Sequence: Synthetic polynucleotide

SEQ ID NO: 16119 - DNA, 204 bp, Artificial Sequence; identical to SEQ ID NO: 15442
  Description of Artificial Sequence: Synthetic polynucleotide

SEQ ID NO: 16120 - DNA, 228 bp, Artificial Sequence; identical to SEQ ID NO: 15443
  Description of Artificial Sequence: Synthetic polynucleotide

SEQ ID NO: 16121 - DNA, 217 bp, Artificial Sequence; identical to SEQ ID NO: 15444
  Description of Artificial Sequence: Synthetic polynucleotide

SEQ ID NO: 16122 - DNA, 201 bp, Artificial Sequence; identical to SEQ ID NO: 15445
  Description of Artificial Sequence: Synthetic polynucleotide

SEQ ID NO: 16123 - DNA, 204 bp, Artificial Sequence; identical to SEQ ID NO: 15446
  Description of Artificial Sequence: Synthetic polynucleotide

SEQ ID NO: 16124 - DNA, 223 bp, Artificial Sequence; identical to SEQ ID NO: 15447
  Description of Artificial Sequence: Synthetic polynucleotide

SEQ ID NO: 16125 - DNA, 201 bp, Artificial Sequence; identical to SEQ ID NO: 15448
  Description of Artificial Sequence: Synthetic polynucleotide

SEQ ID NO: 16126 - DNA, 203 bp, Artificial Sequence; identical to SEQ ID NO: 15449
  Description of Artificial Sequence: Synthetic polynucleotide

SEQ ID NO: 16127 - DNA, 201 bp, Artificial Sequence; identical to SEQ ID NO: 15450
  Description of Artificial Sequence: Synthetic polynucleotide

SEQ ID NO: 16128 - DNA, 211 bp, Artificial Sequence; identical to SEQ ID NO: 15460
  Description of Artificial Sequence: Synthetic polynucleotide

SEQ ID NO: 16129 - DNA, 201 bp, Artificial Sequence; identical to SEQ ID NO: 15471
  Description of Artificial Sequence: Synthetic polynucleotide

SEQ ID NO: 16130 - DNA, 279 bp, Artificial Sequence; identical to SEQ ID NO: 15482
  Description of Artificial Sequence: Synthetic polynucleotide

SEQ ID NO: 16131 - DNA, 203 bp, Artificial Sequence; identical to SEQ ID NO: 15493
  Description of Artificial Sequence: Synthetic polynucleotide

SEQ ID NO: 16132 - DNA, 3238 bp, Artificial Sequence; identical to SEQ ID NO: 15504
  Description of Artificial Sequence: Synthetic polynucleotide

SEQ ID NO: 16133 - DNA, 223 bp, Homo sapiens; identical to SEQ ID NO: 15522

SEQ ID NO: 16134 - DNA, 676 bp, Homo sapiens; identical to SEQ ID NO: 15528

SEQ ID NO: 16135 - DNA, 1238 bp, Homo sapiens; identical to SEQ ID NO: 15529

SEQ ID NO: 16136 - DNA, 220 bp, Homo sapiens; identical to SEQ ID NO: 15530

SEQ ID NO: 16137 - DNA, 631 bp, Homo sapiens; identical to SEQ ID NO: 15531

SEQ ID NO: 16138 - DNA, 223 bp, Homo sapiens; identical to SEQ ID NO: 15545

SEQ ID NO: 16139 - DNA, 676 bp, Homo sapiens; identical to SEQ ID NO: 15551

SEQ ID NO: 16140 - DNA, 1238 bp, Homo sapiens; identical to SEQ ID NO: 15552

SEQ ID NO: 16141 - DNA, 220 bp, Homo sapiens; identical to SEQ ID NO: 15553

SEQ ID NO: 16142 - DNA, 631 bp, Homo sapiens; identical to SEQ ID NO: 15554

SEQ ID NO: 16143 - DNA, 223 bp, Artificial Sequence; identical to SEQ ID NO: 15568
  Description of Artificial Sequence: Synthetic polynucleotide

SEQ ID NO: 16144 - DNA, 676 bp, Artificial Sequence; identical to SEQ ID NO: 15574
  Description of Artificial Sequence: Synthetic polynucleotide

SEQ ID NO: 16145 - DNA, 1238 bp, Artificial Sequence; identical to SEQ ID NO: 15575
  Description of Artificial Sequence: Synthetic polynucleotide

SEQ ID NO: 16146 - DNA, 220 bp, Artificial Sequence; identical to SEQ ID NO: 15576
  Description of Artificial Sequence: Synthetic polynucleotide

SEQ ID NO: 16147 - DNA, 631 bp, Artificial Sequence; identical to SEQ ID NO: 15577
  Description of Artificial Sequence: Synthetic polynucleotide

SEQ ID NO: 16148 - DNA, 223 bp, Artificial Sequence; identical to SEQ ID NO: 15591
  Description of Artificial Sequence: Synthetic polynucleotide

SEQ ID NO: 16149 - DNA, 676 bp, Artificial Sequence; identical to SEQ ID NO: 15597
  Description of Artificial Sequence: Synthetic polynucleotide

SEQ ID NO: 16150 - DNA, 1238 bp, Artificial Sequence; identical to SEQ ID NO: 15598
  Description of Artificial Sequence: Synthetic polynucleotide

SEQ ID NO: 16151 - DNA, 220 bp, Artificial Sequence; identical to SEQ ID NO: 15599
  Description of Artificial Sequence: Synthetic polynucleotide

SEQ ID NO: 16152 - DNA, 631 bp, Artificial Sequence; identical to SEQ ID NO: 15600
  Description of Artificial Sequence: Synthetic polynucleotide

SEQ ID NO: 16153 - DNA, 223 bp, Artificial Sequence; identical to SEQ ID NO: 15614
  Description of Artificial Sequence: Synthetic polynucleotide

SEQ ID NO: 16154 - DNA, 676 bp, Artificial Sequence; identical to SEQ ID NO: 15620
  Description of Artificial Sequence: Synthetic polynucleotide

SEQ ID NO: 16155 - DNA, 1238 bp, Artificial Sequence; identical to SEQ ID NO: 15621
  Description of Artificial Sequence: Synthetic polynucleotide

SEQ ID NO: 16156 - DNA, 220 bp, Artificial Sequence; identical to SEQ ID NO: 15622
  Description of Artificial Sequence: Synthetic polynucleotide

SEQ ID NO: 16157 - DNA, 631 bp, Artificial Sequence; identical to SEQ ID NO: 15623
  Description of Artificial Sequence: Synthetic polynucleotide

SEQ ID NO: 16158 - DNA, 223 bp, Artificial Sequence; identical to SEQ ID NO: 15637
  Description of Artificial Sequence: Synthetic polynucleotide

SEQ ID NO: 16159 - DNA, 676 bp, Artificial Sequence; identical to SEQ ID NO: 15643
  Description of Artificial Sequence: Synthetic polynucleotide

SEQ ID NO: 16160 - DNA, 1238 bp, Artificial Sequence; identical to SEQ ID NO: 15644
  Description of Artificial Sequence: Synthetic polynucleotide

SEQ ID NO: 16161 - DNA, 220 bp, Artificial Sequence; identical to SEQ ID NO: 15645
  Description of Artificial Sequence: Synthetic polynucleotide

SEQ ID NO: 16162 - DNA, 631 bp, Artificial Sequence; identical to SEQ ID NO: 15646
  Description of Artificial Sequence: Synthetic polynucleotide

SEQ ID NO: 16163 - DNA, 2 bp, Homo sapiens
cg

SEQ ID NO: 16164 - DNA, 5 bp, Homo sapiens
cgacg

SEQ ID NO: 16165 - DNA, 24 bp, Homo sapiens
cgaagcgcctcctgcgcagactcg

SEQ ID NO: 16166 - DNA, 2 bp, Homo sapiens
cg

SEQ ID NO: 16167 - DNA, 5 bp, Homo sapiens
cgtcg

SEQ ID NO: 16168 - DNA, 24 bp, Homo sapiens
cgagtctgcgcaggaggcgcttcg

SEQ ID NO: 16169 - DNA, 2 bp, Artificial Sequence
  Description of Artificial Sequence: Synthetic oligonucleotide
yg

SEQ ID NO: 16170 - DNA, 5 bp, Artificial Sequence
  Description of Artificial Sequence: Synthetic oligonucleotide
ygayg

SEQ ID NO: 16171 - DNA, 24 bp, Artificial Sequence
  Description of Artificial Sequence: Synthetic oligonucleotide
ygaagygttttttgygtagattyg

SEQ ID NO: 16172 - DNA, 2 bp, Artificial Sequence
  Description of Artificial Sequence: Synthetic oligonucleotide
tg

SEQ ID NO: 16173 - DNA, 5 bp, Artificial Sequence
  Description of Artificial Sequence: Synthetic oligonucleotide
tgatg

SEQ ID NO: 16174 - DNA, 24 bp, Artificial Sequence
  Description of Artificial Sequence: Synthetic oligonucleotide
tgaagtgttttttgtgtagatttg

SEQ ID NO: 16175 - DNA, 2 bp, Artificial Sequence
  Description of Artificial Sequence: Synthetic oligonucleotide
yg

SEQ ID NO: 16176 - DNA, 5 bp, Artificial Sequence
  Description of Artificial Sequence: Synthetic oligonucleotide
ygtyg

SEQ ID NO: 16177 - DNA, 24 bp, Artificial Sequence
  Description of Artificial Sequence: Synthetic oligonucleotide
ygagtttgygtaggaggygtttyg

SEQ ID NO: 16178 - DNA, 2 bp, Artificial Sequence
  Description of Artificial Sequence: Synthetic oligonucleotide
tg

SEQ ID NO: 16179 - DNA, 5 bp, Artificial Sequence
  Description of Artificial Sequence: Synthetic oligonucleotide
tgttg

SEQ ID NO: 16180 - DNA, 24 bp, Artificial Sequence
  Description of Artificial Sequence: Synthetic oligonucleotide
tgagtttgtgtaggaggtgttttg

SEQ ID NO: 16181 - DNA, 201 bp, Homo sapiens; identical to SEQ ID NO: 14260

SEQ ID NO: 16182 - DNA, 204 bp, Homo sapiens; identical to SEQ ID NO: 14261

SEQ ID NO: 16183 - DNA, 223 bp, Homo sapiens; identical to SEQ ID NO: 14262

SEQ ID NO: 16184 - DNA, 201 bp, Homo sapiens; identical to SEQ ID NO: 14497

SEQ ID NO: 16185 - DNA, 204 bp, Homo sapiens; identical to SEQ ID NO: 14498

SEQ ID NO: 16186 - DNA, 223 bp, Homo sapiens; identical to SEQ ID NO: 14499

SEQ ID NO: 16187 - DNA, 201 bp, Artificial Sequence; identical to SEQ ID NO: 14734
  Description of Artificial Sequence: Synthetic polynucleotide

SEQ ID NO: 16188 - DNA, 204 bp, Artificial Sequence; identical to SEQ ID NO: 14735
  Description of Artificial Sequence: Synthetic polynucleotide

SEQ ID NO: 16189 - DNA, 223 bp, Artificial Sequence; identical to SEQ ID NO: 14736
  Description of Artificial Sequence: Synthetic polynucleotide

SEQ ID NO: 16190 - DNA, 201 bp, Artificial Sequence; identical to SEQ ID NO: 14971
  Description of Artificial Sequence: Synthetic polynucleotide

SEQ ID NO: 16191 - DNA, 204 bp, Artificial Sequence; identical to SEQ ID NO: 14972
  Description of Artificial Sequence: Synthetic polynucleotide

SEQ ID NO: 16192 - DNA, 223 bp, Artificial Sequence; identical to SEQ ID NO: 14973
  Description of Artificial Sequence: Synthetic polynucleotide

SEQ ID NO: 16193 - DNA, 201 bp, Artificial Sequence; identical to SEQ ID NO: 15208
  Description of Artificial Sequence: Synthetic polynucleotide

SEQ ID NO: 16194 - DNA, 204 bp, Artificial Sequence; identical to SEQ ID NO: 15209
  Description of Artificial Sequence: Synthetic polynucleotide

SEQ ID NO: 16195 - DNA, 223 bp, Artificial Sequence; identical to SEQ ID NO: 15210
  Description of Artificial Sequence: Synthetic polynucleotide

SEQ ID NO: 16196 - DNA, 201 bp, Artificial Sequence; identical to SEQ ID NO: 15445
  Description of Artificial Sequence: Synthetic polynucleotide

SEQ ID NO: 16197 - DNA, 204 bp, Artificial Sequence; identical to SEQ ID NO: 15446
  Description of Artificial Sequence: Synthetic polynucleotide

SEQ ID NO: 16198 - DNA, 223 bp, Artificial Sequence; identical to SEQ ID NO: 15447
  Description of Artificial Sequence: Synthetic polynucleotide

SEQ ID NO: 16199 - DNA, 631 bp, Homo sapiens; identical to SEQ ID NO: 15531

SEQ ID NO: 16200 - DNA, 631 bp, Homo sapiens; identical to SEQ ID NO: 15554

SEQ ID NO: 16201 - DNA, 631 bp, Artificial Sequence; identical to SEQ ID NO: 15577
  Description of Artificial Sequence: Synthetic polynucleotide

SEQ ID NO: 16202 - DNA, 631 bp, Artificial Sequence; identical to SEQ ID NO: 15600
  Description of Artificial Sequence: Synthetic polynucleotide

SEQ ID NO: 16203 - DNA, 631 bp, Artificial Sequence; identical to SEQ ID NO: 15623
  Description of Artificial Sequence: Synthetic polynucleotide

SEQ ID NO: 16204 - DNA, 631 bp, Artificial Sequence; identical to SEQ ID NO: 15646
  Description of Artificial Sequence: Synthetic polynucleotide
